United States Patent Application Publication US 2025/0170189 A1 - sequence listing, part 3

SEQ ID NO: 3 - DNA, 5442674 bp, Bacillus megaterium (residues 3,628,451-5,442,674 of 5,442,674)
  misc_difference 285093..285192: note = n is a, c, g, t or u
  misc_difference 286876..286975: note = n is a, c, g, t or u
  misc_difference 289709..289808: note = n is a, c, g, t or u
  misc_difference 290037..290136: note = n is a, c, g, t or u
  misc_difference 293723..293822: note = n is a, c, g, t or u
  misc_difference 310240..310339: note = n is a, c, g, t or u
  misc_difference 320398..320497: note = n is a, c, g, t or u
  misc_difference 334732..334831: note = n is a, c, g, t or u
  misc_difference 352540..352639: note = n is a, c, g, t or u
  misc_difference 357100..357199: note = n is a, c, g, t or u
  misc_difference 361890..361989: note = n is a, c, g, t or u
  misc_difference 365030..365129: note = n is a, c, g, t or u
  misc_difference 366366..366465: note = n is a, c, g, t or u
  misc_difference 369081..369180: note = n is a, c, g, t or u
  misc_difference 396532..396631: note = n is a, c, g, t or u
  misc_difference 413012..413111: note = n is a, c, g, t or u
  misc_difference 456124..456223: note = n is a, c, g, t or u
  misc_difference 492731..492830: note = n is a, c, g, t or u
  misc_difference 510078..510177: note = n is a, c, g, t or u
  misc_difference 1211610..1211709: note = n is a, c, g, t or u
  misc_difference 1213463..1213562: note = n is a, c, g, t or u
  misc_difference 1612216..1612315: note = n is a, c, g, t or u
  misc_difference 1660890..1660989: note = n is a, c, g, t or u
  misc_difference 1661347..1661446: note = n is a, c, g, t or u
  misc_difference 1661959..1662058: note = n is a, c, g, t or u
  misc_difference 1662572..1662671: note = n is a, c, g, t or u
  misc_difference 1664647..1664746: note = n is a, c, g, t or u
  misc_difference 1665107..1665206: note = n is a, c, g, t or u
  misc_difference 1665375..1665474: note = n is a, c, g, t or u
  misc_difference 1667606..1667705: note = n is a, c, g, t or u
  misc_difference 1960933..1961032: note = n is a, c, g, t or u
  misc_difference 1962618..1962717: note = n is a, c, g, t or u
  misc_difference 2041611..2041710: note = n is a, c, g, t or u
  misc_difference 2042037..2042136: note = n is a, c, g, t or u
  misc_difference 2042279..2042378: note = n is a, c, g, t or u
  misc_difference 2058614..2058713: note = n is a, c, g, t or u
  misc_difference 2058943..2059042: note = n is a, c, g, t or u
  misc_difference 2094217..2094316: note = n is a, c, g, t or u
  misc_difference 2094650..2094749: note = n is a, c, g, t or u
  misc_difference 2095233..2095332: note = n is a, c, g, t or u
  misc_difference 2145872..2145971: note = n is a, c, g, t or u
  misc_difference 2288718..2288817: note = n is a, c, g, t or u
  misc_difference 2289327..2289426: note = n is a, c, g, t or u
  misc_difference 2449277..2449376: note = n is a, c, g, t or u
  misc_difference 2449605..2449704: note = n is a, c, g, t or u
  misc_difference 2623807..2623906: note = n is a, c, g, t or u
  misc_difference 2624202..2624301: note = n is a, c, g, t or u
  misc_difference 2708781..2708880: note = n is a, c, g, t or u
  misc_difference 3117513..3117612: note = n is a, c, g, t or u
  misc_difference 3122206..3122305: note = n is a, c, g, t or u
  misc_difference 3154831..3154930: note = n is a, c, g, t or u
  misc_difference 3158863..3158962: note = n is a, c, g, t or u
  misc_difference 3174364..3174463: note = n is a, c, g, t or u
  misc_difference 3528856..3528955: note = n is a, c, g, t or u
  misc_difference 3628996..3629095: note = n is a, c, g, t or u
  misc_difference 3673086..3673185: note = n is a, c, g, t or u
  misc_difference 3692341..3692440: note = n is a, c, g, t or u
  misc_difference 3701369..3701468: note = n is a, c, g, t or u
  misc_difference 3735218..3735317: note = n is a, c, g, t or u
  misc_difference 3756492..3756591: note = n is a, c, g, t or u
  misc_difference 3789247..3789346: note = n is a, c, g, t or u
  misc_difference 3821065..3821164: note = n is a, c, g, t or u
  misc_difference 3823466..3823565: note = n is a, c, g, t or u
  misc_difference 3834555..3834654: note = n is a, c, g, t or u
  misc_difference 3835622..3835721: note = n is a, c, g, t or u
  misc_difference 3840732..3840831: note = n is a, c, g, t or u
  misc_difference 3845768..3845867: note = n is a, c, g, t or u
  misc_difference 3847694..3847793: note = n is a, c, g, t or u
  misc_difference 3853646..3853745: note = n is a, c, g, t or u
  misc_difference 3904833..3904932: note = n is a, c, g, t or u
  misc_difference 3916011..3916110: note = n is a, c, g, t or u
  misc_difference 3932635..3932734: note = n is a, c, g, t or u
  misc_difference 3943727..3943826: note = n is a, c, g, t or u
  misc_difference 3974728..3974827: note = n is a, c, g, t or u
  misc_difference 4033361..4033460: note = n is a, c, g, t or u
  misc_difference 4073484..4073583: note = n is a, c, g, t or u
  misc_difference 4125414..4125513: note = n is a, c, g, t or u
  misc_difference 4164179..4164278: note = n is a, c, g, t or u
  misc_difference 4320059..4320158: note = n is a, c, g, t or u
  misc_difference 4356086..4356185: note = n is a, c, g, t or u
  misc_difference 4357514..4357613: note = n is a, c, g, t or u
  misc_difference 4462059..4462158: note = n is a, c, g, t or u
  misc_difference 4469603..4469702: note = n is a, c, g, t or u
  misc_difference 4474027..4474126: note = n is a, c, g, t or u
  misc_difference 4540507..4540606: note = n is a, c, g, t or u
  misc_difference 4543512..4543611: note = n is a, c, g, t or u
  misc_difference 4773064..4773163: note = n is a, c, g, t or u
  misc_difference 4946528..4946627: note = n is a, c, g, t or u
  misc_difference 5000268..5000367: note = n is a, c, g, t or u
  misc_difference 5020301..5020400: note = n is a, c, g, t or u
  misc_difference 5378890..5378899: note = n is a, c, g, t or u
  misc_difference 5379030..5379039: note = n is a, c, g, t or u
  misc_difference 5379272..5379281: note = n is a, c, g, t or u
  misc_difference 5379719..5379728: note = n is a, c, g, t or u
  misc_difference 5380250..5380259: note = n is a, c, g, t or u
  misc_difference 5380402..5380411: note = n is a, c, g, t or u
  misc_difference 5381198..5381207: note = n is a, c, g, t or u
  misc_difference 5381593..5381602: note = n is a, c, g, t or u
  misc_difference 5381734..5381743: note = n is a, c, g, t or u
  misc_difference 5382210..5382219: note = n is a, c, g, t or u
  misc_difference 5382442..5382451: note = n is a, c, g, t or u
  misc_difference 5384627..5384636: note = n is a, c, g, t or u
  misc_difference 5384869..5384878: note = n is a, c, g, t or u
  misc_difference 5394187..5394196: note = n is a, c, g, t or u
  misc_difference 5394417..5394426: note = n is a, c, g, t or u
  misc_difference 5394595..5394604: note = n is a, c, g, t or u
  misc_difference 5394751..5394760: note = n is a, c, g, t or u
  misc_difference 5412850..5412859: note = n is a, c, g, t or u
  misc_difference 5413303..5413312: note = n is a, c, g, t or u
  misc_difference 5413760..5413769: note = n is a, c, g, t or u
  misc_difference 5424507..5424516: note = n is a, c, g, t or u
  misc_difference 5424645..5424654: note = n is a, c, g, t or u
  misc_difference 5424906..5424915: note = n is a, c, g, t or u
  misc_difference 5425369..5425378: note = n is a, c, g, t or u
  misc_difference 5425542..5425551: note = n is a, c, g, t or u
  misc_difference 5425987..5425996: note = n is a, c, g, t or u
  misc_difference 5426410..5426419: note = n is a, c, g, t or u
  misc_difference 5426629..5426638: note = n is a, c, g, t or u
  misc_difference 5427239..5427248: note = n is a, c, g, t or u
  misc_difference 5427679..5427688: note = n is a, c, g, t or u
  misc_difference 5427839..5427848: note = n is a, c, g, t or u
  misc_difference 5428327..5428336: note = n is a, c, g, t or u
  misc_difference 5434176..5434185: note = n is a, c, g, t or u
  misc_difference 5434328..5434337: note = n is a, c, g, t or u
  misc_difference 5434575..5434584: note = n is a, c, g, t or u
  misc_difference 5438370..5438379: note = n is a, c, g, t or u
  misc_difference 5442274..5442283: note = n is a, c, g, t or u
  source 1..5442674: mol_type = genomic DNA
  misc_difference 4591221..4591320: note = n is a, c, g, t or u
aaaacagtgatctgtttgaaagcaaaaaatttgcacagtggcatgagctatggcagaaaagattaggtagacaaaaacaatctaaagcggagtcacaagagcttatgaaaaataataatccggctgtcattcctcgaaatcaccgagtggaagaagcgttagacgcagcacaaaaaaaagactacagcgtcatggaaacccttcttgaagtgatttctagcccatatgaatctccgggtcagccagagtattgtacaccgtctgctccgtctaagcagccttatcaaacgtactgcggaacttgattcttaaataagaactgctatttaaaaacagcacaaatgatatcaaaaagagctctttataaagagctctttataaagagctctttttgattttctgaaaaatgtattattgattcattaaaatgatagcgatttctcgtgaaaagctacataaaatttaacaggataaaagaatcaaattgaaaagcaattatctaattcttttgtctctcattatttccaataggaactattatataannnnnnnnnnnnnnnnnnnnnnnnnnnnnnnnnnnnnnnnnnnnnnnnnnnnnnnnnnnnnnnnnnnnnnnnnnnnnnnnnnnnnnnnnnnnnnnnnnnnatacattaacaatatttttttgaaaatggcttactttaacaattgtagaagagcttataaaaaatagcaggttaaatatgatggtgaatttgctcatttaattaaaaagttgaaggtttaagactttataaccaaatgaaagatataagagaagaaaaatgagataattactccattttacctatttgacttttcaatattatgcaagtaatcttggaaaggtaatggaaccggttctgttatttcgccagattgatatgacttctcgatacatagaaaatgaattgcttgtgagtgacacaagaaaaggtattatacaaaagggagaaaaacagatgaatattaagaaaatcgcaaagcaaactacagctttatcttttgctacagctctgttaataggtgctggatctcaaacatgggctgctgaaagcaatcataaagataccaacaataattatggagtttcccatattacacgtgataacatgctgaaaattcctcagcagcaaaaaagcgaacagtttaaagttccagcttttgataaatcaacaatcaaaaatattgcctctgcaaaagggtatgataaatcgggcaatttaattgatttagacgtatgggacagctggcctctgcaaaatgctgacggaacagtagccaactatcatggttaccaagttgtatttgcactagcaggcgatccgaaagatgctgatgatacatctatttatgtgttttatcaaaaaatcggtgaagattcgattgacagttggaaaaatgcaggaagagtgttcaaagacagtgacaaatttgtaccgaatgatcctcatttgaaaaagcaaacacaagaatggtcaggatctgctactttaacatcagacggaaaaatacgcttattctatactaacttttcaggtacaaactatggaaaacaaaccataacaacggctcaagtaaatgtatcccagccaagtggagatacgttaaaaattgatggtgttgaagatcataaatccatttttgatggtgatggtaaaaagtatcaaaatattcagcagtttattgacgaaggcgcatatggttcaggagataatcatacgttgagagatcctcactatgtagaggataaagggcataaataccttgtatttgaagcaaacacaggaactgaagatggttatcaaggtgaagattccctttacaatcgagcttactacggtggaaataatccatttttccaatcagaaaaagagaaattacttcagagctctaataaaaagaaagcctctttagcaaacggtgcattaggcattgttgaactaaataacaattataccttgaaaaaagtaatggatccactgattacttcaaacacggtgacagatgaaattgaacgcgcaaatgtatttaaaaaagatgggaaatggtacttattcacagattctcgcggatctaaaatgacgattgatggtatcggccaagatgacgtatatatgctagggtacgtatcaaatacgctgacaggaaaatacaagccgctaaatgatacaggacttgttttacatatggacctcgatcctaatgacaaaacgtttacgtattcacattttgcagttccacaagtgaaaggagacaatgtcgtaatcacaagttacatgacaaacagaggcttttattcagaggaacattctacttttgctcctagcttcttgttaaatattaaaggatcaaaaacagctgttgtgaaaaacagtattttaccacaagggcaattaagtacggataaataatttttaaaaacgaaagaagatggcggtaactgctgctgttttctttcgttttattatttaatcaaaaatgtgctgtaaacgcagtgctgattaaaataaaaaagcagtatatacattaatagttatttaaagaaaatgaaacattcagacagactataacttcaagaatgaaaccggttgacatgcaagtttgactaacttaatatatttacatataatggtttgaaacgttttcatagattagtatcacatgagggtacttgtagatgaaatagcttgtagtagtagggaatgatcatttctttgaaagagaaaattccaatcgtgaactgaaaataaagaaggtgcttctaatgaaacgaattgataaggtatacaatcagctgttgagtaattttcaagagtttacagaagtggaacttttacataaacaaggaagctcagcgattgaaattgctgaacagttagatttagagagatctaatgtaagccttgaacttaacaaacttgtccgcctgcaaaaagtaatcaaaattaaaatgttccccgttcgctacgttccgctagaggttgttgaaaccatttgccgtcacaagtgggatacgaataagatggaagtagaaaaactagagcagctatctaatgggggtaaagaagaagctcttcctgctaatccttttgaattaatgattggagctaccggaagtttgaaaaaatcgatttctcaagcaaaagctgctgttctttacccgcctaatggattacatatgctgctattaggtcccacgggatcgggaaaatctctttttgcaaaacgaatctatcaatttgccttatattcagagaggctaaaaacagatgctccgttcattacctttaactgcgctgattattaccataatcctcaattacttctttctcagttatttggtcataagcaagggagtttcaccggagcaactgaaagtaaagtaggtttagtagaacaagcaaatgaagggattctctttatggatgaagtacaccggcttcctcctgaaggccaagaaatgcttttttacctcattgatcaaggtacgtacaatcgcctaggggaaacagatcataagcgaacgtctaaggtattaattatttgtgctacaactgaaaatcccggttcagccttactgcaaactttcttaagaagaattccgatgactatccatattccctcattagaagagaggtctttaaaagaaaaaattcgcctcaccacgtttcttttagaacaagaggctaagcgaattaataaaaagctaagtgtccacattgatgtattaaatgctttaatccacactgaaaaattcgggaatgtagggcagttaaagtcgaatgtgcagctcgtttgcgcacacggatttttaaataaccttgatagtaaacatatggtggaacttacagtgcgagatctgcctgacgatattaaacgagattggatttcaaatagtaaaaatatggagcgcagcaaaaaaatttctgaatatgtaaaccttaaaacgattatctccccggctatggagagccaagaaataaaaatggaggaagacgtatcatttaatttatatcagttaatagaagaaaaagtagatgttttaacaaaagaaggtttatctcaagaagatatcaatcagtatattcttaccgacattcatttgaatgttcgaagcttttttaatcaaaaaaatggccagagctctaatttaatgaaattcgtagaagacgatgtgatgcagcttacaaaagaattaaaacagttggctgaaaaagaattgaactgtaaatttgatcgcaggtttattcattttttaagtatgcatatggaatcctttttaaagcgaaaaaaacaagtagacgtattaaatacaaaggagatagatgaaattcgcgaaacatatccaaaagaatatgcggtagcactgctttttaaaaatcgaattgaaatgtggtttaacattagcgtgccagaaatagaagtcatttatctcacaatggttattcaatcaattcgaacgttagaagaaaataaacgagtagggattgtagttgctgcccatggaaacagcacggcaacttctatggttgaagttgctacggagcttttaggaagcactcctattatagctattgatgtgcctttgacggtatctccggttgaaattgtagacaggttaatccaaggaattaagaaagtagatgaaggagaaggcgtattaatgcttgtggacatgggctcgcttgccatgttagaaagcaagttggaacaaaaaacagggactaaaattaagaccatcagcaatgtgacgacgtctatggtgttagacaccgttagaaaagtaaattatttagatttaaatttatatgccatatttgattcggtgcaaaaagactttatggaatttatagataagcagcagcacgtgtttggaaaaaagaaagcacttgtttctatttgtacaacaggaagcggtacagcaaaacaattagaaaaaatcttaacgattatttcacgcaaagtatctcaagaacctattaaaattctaaccgtttcttctattaaattagcagcaaacattcgagaaattcaaaaagaatatgaaattgttgcaacggcaggcactaaaaatccaaggattgatgcgcctcatgtatcattagaagttctcattgaagggcagggagagcgaatacttcaacaggcaattacaaaagaaacgataagctatgatgacgagaaaaccgaagcgaatattgtggtgcgtgaactttgcgaagaaaacttgcgaaagtaccttctatttattaatccgtacctcataagtgaaattctgttagagtggttaagtcatgtacaagatgagttagaaatggaattaagcaacactgttatgattcgaattgtgatgcatacagcctttgctttagaaagaatgataaaaaatgaacctcttacttttcccgaggatgaagaaatcactcacgagttagaaaacatttatcaaaaaacggaaaaaacattacaagccgtcgaaaaaaagctgaaacttaccttaacaagagatgaaaaattatttattgccaccatttttgcggatgaaatgtaaaaatcatattataattttgagaaactagtttgatttatatgccactagtttctttttttatcccattttttaaataacagaaaaacctgtattaaaacgcatgacgttttgatacaggtttgtttattttaaggaacctgtatcaacaacacagaaaaaggtattgaaaaataaatgaaagcgcttaatactctttgttggcacgatacttgcaataaataagtgtagaacgtaaaagagaggagcaagtgtacatgatttcagtcattattagtggacatggtgatttcgcgccagcgttagaggggtcttccaaaatgatatttggtgaagagaatcacgtagtagccgtaccttttctaaaaggagagggtatccaaacccttgaagaaaaatataagcaggcattagaggaaatgcccttagaaaatgaagtgctttttctagtcgatattttcggaggtacaccctacaatgcggctactccatatatccttaaaaataaaacagcggatatggtatccggagttaacttgcctatgttattagaagtgttagccatgagggaacatgttacattaaaagagatgctaggaagattaaagcaggtaaatgaagaaagttttcaagtgtgcagtgaacatttggagaaaatccagcaagcgaaccaaatcggagaggatggattattatgaaaatcgttttagcaagaattgatgaccgctttattcacgggcaggtattaacaagatggatcaaaacaaatgcagcagatcgaattatcattgtttcagatgaggtggcagcggatgaaatgcgaaaaacgcttattctttctgtggctccttcgaatgtaaaagcgagcgctgtctcgatttctaaaatgacaaaagcatttcacagccctcgttatcaggatacaacagccatgctgctgtttgaaaaccccgcagacattgtcgctcttgttcaagcgggcgtacctattgagacagtaaacgtagggggcatgcgttttgctaatgaccgaaaacaaatcactaaatctgtaagcgttaccgaaaaagatatcgatgcttttgagaaactgcaggaactaggcgtaaagcttgagctgcgccaattaccttcagattctagtgaaaattttattcaactactgagaaacgaaacaaaaatcaaataaggagatgagtttatgtcttccatacaaattattttattattagtcattgcagcagtaactggcattgcaagcgtgttggacgaagggcaatcccatcgtcctctcattgcctgcacgttagtaggcttggtgcttggagatttaaaaaccggcattattttaggtggaacactggaattaatggctcttggatggatgaatgttggattggcgatggcaccagatacggctattgcttctgttatttcaactattttagttatcacagctggtcaggggattggtgaaggcattgcggtagccatagctttagcagctgcagggcaagtactcaccatttttgttcgtaccattacggtatttttaattcatcgagctgataagtacgcggaagaaggaaactttaaaggaattgaaattatgcatattactgctatgggttttcaggctctccgcgttatgattccaactttaattgttacattaatcagcgtaagcgccgtgcaaactttcctcggcaatattccggaagttattacaaaaggcctgcaaattggaggaggcattatcgtggtcgtaggatatgccatggttatcaatatgatgaacattcctcatttaaagccctttttctatatcgggttcttactggcggcatttacagggtttaacctggtaggatttggagcgctgggtctttgtttagcacttctttatcagcaagtaatgcagcagcgaaatcaaatgcagccggcaggcgttcccgcagctacagggagcgaacaagtatatgatgatgacgatgatttagatgcctaaacggcgaacttaagggagggatagagatggaaaatgaaaaaagattaacgaaaaaagatatctttagcatgttcattcgttcgaattttttacttggttcatttaactttgaacgtgttcaagcaatgggctactgttatgttatgattccagcaatcaaacgcttatatggaccaggagctcagcgaaatgcagcattaaagcgtcacttagaatggttcaatacacacccatggatttccgcacctatattcggcgtcacggcagcaatggaagaagaaatggcaaacaaaaaagattttgatgaaaaagctatcagcggaatgaaaattggattaatgggcccgcttgctggtgtaggagaccctattttctggggaacgcttcgaccagttctcgcagccctaggcgcctcgcttgcgttaggcggtaatattgccgggccactgctgtttttcatcttaattaatgcaattcgattaagtacaaaatattatggattaaaatatggttacttaaaaggaacagaaattttaaaagatttagtaggcaatcgaattcaaaaactgacggaaggtgcatccattttaggactcttcgtaatgggagcgttggtttcgaaatggaccactattaatataccagtggttgtttctaggatcaaagatgattctggtaaagttgtggtaaaaaccgtgcaagacgtacttgatagtattctaccggggctgcttcctttagcactaactctattagtagcatggatgcttcgaaaaggtacaaatccgctgcttattattttcggtattttcttaattggtatagggggttattggataggctttttaggatgataaataagaggagtcatctattcttctagcatctgctggtgaaaatgttttacataaccagtatgcaaataaaggaggaaaggaagatgaaaagaaccgttaaaaagttattgatgattggagtcgcttgttccataagcttgttttctgcatgccctgtattagctgataatacagggtattatcaagaaaaataccggaatcaatttcatttttctccagaagcgaactggatgaacgatccaaatggaatggtctattataacggagagtatcaccttttttatcagtattatccttacggtaccacttggggacctatgcactgggggcatgcagttagtacagatttagtgaaatggaaacacctgccgattgctctttctccagacgagaacggagagattttttccggaagtgccgttatcgattggaataataccgcagggtttggaaaagaagcaatggtagctatctttacacactcgggcagaaaaggacaagtgcaaagtctagcatacagcaaggacaggggaagaacgtggaccaagtatgaaggaaaccctattatgccgaatcccccagttcctgactggcgcgacccaaaagtgttttggcatgaccaaaccaagcagtgggtgatgtctttagctgctaaagataaaattatgttttatacatcacctgacttgaaaaattggaaatacgcaagtgagtttggacctgatggaggcatccaagcaaacggtcaaagtggtgcatactcatataccttatccgaacaaaaaggtcaatcctttactctagagggggaaattacgcttgtagaaaagaatggacgcgcaggcgcaggcggtcttgtttttcgttctaataaagacgcaacaaacgcatataccgtcaatttagatgcagaaaagaacctcttaacacttaacaaagtagagaaaggaaacataacgactgttgtttcaaagccaatgaggcttgatacatcacaagcatatcatgtaaaagtagaagcaaacagtcactactttaaggtactgctaaatggaaaacaggttctagaaggcagtgatgcatcttttgaaaatggtcagtttggattaacagcatggaattccacagctgtctttcgtcatgttaaatttacgaatcaatctaatttcataaccaatctatctaactggaaacctgttacgggaacatggaatgatactgctgatggaaaaaccggtaaatctgacagcgacggatacattatgagtgaagaacagggagatcagtttatttacgagtcaaatatgacatttttagatgaaaaccctggttcaggtgcactactctttcgggcagacgcggaagccaaaaacggatatatagctagcgtggatgcttctaaggatacaatcaaactagtaaagcttcaaaatggcatttcaactgtccttgccgaaacaaatgaaaaaattgatacgagcaaatcacatcaagtaaaagtaactgcatctggaaataaacttgatttgtatatagacgataacttcacccttactgcaaaagatgaaactttttcaaaaggattgtttggactacacgttaatcaatcttcagtccggtttcaagacgttaacatgaccaagtttattgatacagatgaaaaagaaattaaaaataaaagttttgaaacaggcgatctcaccggctggaaaacgataaaaggaaatgcattcacaaacgatcatgtaacggatgcaaccacaaattggagcggtctctttgaacaaaaaggaaagtatcatttatgggggttttctgataagcaagatggtgataatgccactggagaattacattcgtcttattttaaattgagcggatcaggtgaaatcaatttgttaatgggaggcggaaacgaccccgcaaaccgctatgtagccttagtccgggcatccgacgataaagaattgattcgtcaagcgaatacaaagtttgcagatgaaaagtatcagcgctacgtatgggatgcttctaagtatataggagaagtactgtacattaaagccgttgatcaagctgtaggcggatgggggcatattaatctagatgatgtgaatgtatttcatacagaaaaaatgccggataaagtagacagtgtagcaaaagaaccggaggaagctaaacaaagagaaagcggagagatttcagattggaacacagtgtcaggagaatgggtgaattcaactcacggaagcaacggaggcatttgggagtgtcctactttactcgaactgccggttgatggagacagcacaaagaaaaaatgggtgctgcaggtcagcatcaatgatggagcggcagctggaggttcagggatgcagtactttgttggggattttgacggaaaaacatttaaaaatgaaaacccgccagaggaagtgctttggacagattatggtgccgacttttatgccgctgtagattggagcggagttgcaggagataacggagaaaagtattggctaggctggatgagcaactggcaatatgcaaacaatactcccactactacttggagaagctctatgtcaatcccaagaaaaatagaactcaccaacacagcaaaagggcttcgtttaaaacaaatacctgtttcaattgattcaatccgcaataagcaagaaaaaaagatattgaagaatctcatggttactgaaaatggaaatcttctttcaggcatacaggaaaacaaatatgaaattatggcagaattcgatgtttctaatacagaggcacaagaatttggttttcaaattcaaaaagaaggcagtgaaaatacgaaagtcagctataacataaacaaacagcgattatctgttgaccgaacaaactctggaagttttgattttggtgaaaatgtgaaaggcaaacactctgcttccatgcttccaaaagacggaaaggttaagcttcatatgtttgtagaccagtcgtctgtagaagtatttggtaatgacggcacagaagtaataacagaccagctctttccaacgctttcaagcaataaaataaggctttatagcaaaggaggcgctgtaaaattaaattctcttaagatgtatccgttaaaatcaatttggaataaaagtcctgttgagacaaacttatcagggtggaaaagcattagcggactatgggccgatacgattaacgggaaacaaggacgaagcaaagaagatgcctttaccttatcatcaaaagaagcaaaaaatttcacatatgaggcaaagataaaggtgttaaaggaggctgtttcaaattctacaggagcaggagcgctagtattccgttcggatgaacaggcaaataacgcttacgctgcgaatgtagatgtgcttaataatcaagtgaaactcattgcgtttagagatggaataggaaaggatctcattatttacgacgatgggggaaagctggatttaaaaccaaatacggattaccatctaaaagtaagggctgaaggagagcacattcaagtttatctcgatggcaagctggtgatcgatacaatggatcctaccttttcagaaggttatgctgggctgaatgtgtggaattctactagtttgtttaatgaagtgaagcttgaaatagtggattaagggattgtgaaagctgccgtttactaaggcagcttttatataacataaaaaagtatgctgcggtgaagtagcatgcttttttgaatttcataggttaatgaagagggtttttacatatgataaatatcttactagtctaattaatcgtacattttagttcttaaaaggtcttttgaaaaatcctcataaaaatatgataaaatcggataggatatatatttcgaggaaggaaagtgttttttatgattattggtaacgaacaagatttagaaagtttacgcaaaattggacgcatcgttgcacttgcgcgcgaagagatgaaaaaccaagcaaaagcaggtatgacaacaaaagaacttgatatgatcggtaaaaaaatattggatgaacacggtgctacttctgcacctgaaaaagaatataatttcccaggtgtaacgtgcattagtgtaaacgaagaagtggctcacggtattccgggagatcgagtattaaaagatggcgatttagtaaatgtggatgtatctgccgtacttgatggctattattcagataccggtatttcatttgttattgggaaagatgaagaaaaagaaaagctgtgtcaagctgcagtagatgcattttgggcagctatgaaaaaagtaaaagctggttcaaaacaaaaccaaattggtcgtgctgtttctaactttgcacaccaaaacggatacgcggttattgaaaatttaacgggtcatggtgttggccgcagcttgcatgacgctcctaaccatattttaaactattatgatccaatggataaagcccttttgaaaaaaggccttgttattgctgtagaaccgtttatctctatgaaagctgatcatatcattgaacgcggagacgacggctggacgtttgttacacctgataatagtcttgtagcacaatgtgaacatacgattgttgtaacaaacggtgaaccgattattttaactgaactataatcaagttccgcacgtcttcttatttttatagattccattaattaaattaataaaaagctacttcacttagcaatgtttttttattgtgttatagtgaggtggcttttttgatttattacgcaatgaatgatgatcatattgatttgctttgttcagataacgtttgaaagatagtgtaattgaatatgctcaagggaatgctaaacataaatcaaaatgaaaaggggtataaaatgtggaatatgtaaaaagagaaacggctataagtgaactgacgcatcatatggatgatattttaaacaaatataaccttcaaggcgtctccgtatatgaagaagaaggagaaggtaatcactattatcttggctacacagtaaaaaagaatgatcaggtgtttatgctaaacagaccttatctaaaagataaagacgggaaactagcagtagaaaagcaagaatggaccgttcaaggtaacgaaggagaaacaaatggacatgcttcacttgaagatgcatttcaaaaaattgatgaaatcgtacattaaataaattcgatgaatttcactgcggatacttttctttgaacacttgagtacgagcagtagaagcgctaataggtaacgggtgtctttcatctatactatctaaattttctttgctttgaaatctagaaaattatataatgaaaaattgtttttttaggttttactatataaatacggggtacacatatagtacagcagctatcatgcaaatggttgttgtgaaaggttaaatacttagcgtttgaagggactgattagttttgaaaggcttaacagcgacttcagcaaatgtattaccgcaaattgaaagcagatattcgtatctgacacaaggcactttggttatgaaccgatatacgtaacgaaagggcctgactaggcaaacaaaggaaagactgaatcaactagaagaagcctgcatctaaaaatgtaggcttcttcttttttacagatgaaactaaggtgatgagtgagtacatagcgggtatgaattcaaaagattcacattcaatcaattttccgtgcacgtttttcttgaaaaaaggtcataagttgaagatactgtatataactatgtaaaagaatttttgaagacaaaatagtaaatctgcttgaggtgaaaatgatgagaaaagcaaataaaagtgaatttctgtggaatacgttagacggctggctttttatccctaggaacattcctttactattcctttttgtatttctcttaggggtttcttacctaggttgggttaagctgtttcataaattcgtttagatacaccaatgagctgaaacaaaaaactgtttcagcttgtgggcgtggtgatttatttattttatgtatagctgtaccgtaatttacctaaattattcattccatcctttgcatacatcaacccattttaagcatttcgaaaattcttctagttcgggtattgttaattcgattgcactatttccacttccacaggcagggaaaatggtgacaaaacgtttcagagattcatctaggtacacgtgaacaccttcattaacggcaaacgggcatactccgcctacagcatgaccaatcagcgtttctacttcacttgctccaagcatttttgctttggttccgaactcttctttatattttcggttgtcaatttttgcatctcccgctgccacaatcaataaaacggttccttctgcgttaaaagaaagactttttgcgattcgttgcggctcgcattttaaagcttgcgctgccagttctacagtagcactggactcatccatttcaataattcgattctccatgtcatattgtttaaaatatgcttttactttttcaatcgccattttttatatccattcctttcattgaatctcgcaaatatgtatgattgccttacagagaatgtacagttgttctttaaagtgaaaaattcttattattttaatatacagaaattatacacaactttgaagttaaaagcacatattcgttttaattaaaaaagttacgtaagtaaagtatttttaactgattaaagcaggattacggaaccctttgacgaatgtaactatgtcggctgcgaaaacataggcattagaacaaaagataaatgatgaaattgaaaaggcgcaaacgttctagtgaaatgaggagaaggaatgccaaatttacacactgtcgtcagtttttttagcagtacatgtatggcaacgatgagtatgatttatttgttttcccttgtgccgcgcgcatggtcttttaaatttcgatttggagccatggttataggaatcccagtcggcattataatgggacaggttgctatgctgatcggctggcaccatcattaaaactttgaactttttaacaaaaaaggagacgtgtaaaatgaatatggttacattaaacaatggtttaaaaatgcctcagcttgggtttggcgtatggcaagtagaagataaccaagcagcagctgcagtgtcaaaagcaattgaggttgggtatacctctattgacacagctatgatttataaaaatgaagaaggagtaggccaggcgattaaagaatcttctgttcctcgagaacagctgtttattacaacaaaagtttggaacagcgaccaaggctatgaaaatgcattacgtgcatttgatgaaagcttagaacgattaggacttgattatgtcgatttatatttaattcactggcctacgcctcaatatgatgagtacgtggagacgtataaagcattagaaaagctttatcacgacggaaaagtaaaagcaattggcgtctgcaactttgaaattgaacatttagagcgcttgttaaacgaatgtgatgtaacaccggttttaaaccaaattgagtgccatccgtatcttgctcaaaacgaattaaaagagttttgcgctaaacataatatttttgtggaagcatggagtcctcttgatcaaggcggagaagtgttacaagacgaggttattcaaaaaattgctgaagtacatagcaaaactccggctcaagttgtattgcgctggcacttacagaacaacacaattgtcatccctaaatcagttacaccgtctagaatagaagaaaactttaacgtgtttgattttgaactaactgccgatgatatggcagagattaatgggttaaacagcaaccgccgcaaaggtccgcacccaagtgacatgaacgtccgataacgtttaaaaaataaaattttgcagccgtgaatcatcgctgctataagaaaaaaccattttatttcagattatttaaaattttcttaaataatgattgacaaatgattaattcagcgcaatacttagtgtagatactctagttgctttaagatgtacagcttaaagtgtatagtgatttagtcatttagcgattgtatgtataagtgaaatactgattattaataaaagcccatagtgtaagtaggttagtttatagggggctatatcaaaaggagcttgtttcctctttgatatagcccctttttgtgttcaaaaagaaaaggtagtctacagtttaacaagggagcgggtatgatgtttattcaaattgatggaaattcactgacgttcgaccaaatttacaaagttatttaccaaggatactccgtgaaaattagcgatcacgcagttgaacatatacaaaaaagcagaacgttagttgaagagagcattacgaacaacaacgtcatttacggagtgaatacgggatttggaaagtttagcgatacggttatttcaaaaacagacttagctgatctgcagattaacctaattcgcagtcatgcctgcggactaggagagccattctcgttagaagtaagcagagtcatgctgcttttacgagcgaatgcattagctaaagggtattccggaatacgactggaaaccttgcagcttcttatcgattgcttaaatcaaaacgtagtaccggttatcccgagtcaaggttcgcttggagctagcggtgacttagccccgttatcacatctagcgctgctactagttggagaaggagaagctgtatataatggtcagcgaatgcaaggagaagaagctttaaagctagcggggcttgaacctatacaattacaggcaaaagaagggctagctctaattaacggcactcaggcaatgacggctgtaggcgtagcttcgtaccttgaagctcaaaagctcgctgatcttgcggacgggattgcagcactaacactagaaggtctgcaaggtattgtagaagcattcatgcccgagtctcatgcagtaaggccttatcgcgaacaacagcaggtagctgcccgaattctttcgtacttagaaggcagtcaattaactacttctcaaggtcaaataagagtgcaagatgcttattcactgcgctgtattcctcaagttcatggtgctatttatcaagttttaaattatgtgaaagaaaagcttttaattgagattaattcagcaaccgataacccgctcatctttgccgacagcggcaaagtaatttctggagggaactttcacgggcagcctattgcgtttgctatggattttctaggaattgcaatggcggagcttgggaatatttctgaacggcgcattgaacgaatagtaaaccctcagcttagcgggctgccggcatttttaagtacagatccaggtctagagtccgggctcatgattactcaatacgctgctgcttcattagtttccgaaaataaagtattagcgcatccatcaagtgtcgattctatcccatcttcagcgaatcaagaagatcatgtcagcatgggaacgactgctgcacgtcatgcttatcaaattatccaaaatacacgaagagttttatcaattgaagcaatttgtgcggctcaagcagctgatattcaaggggtggataaactggcttcggaaacaagaaaaatttattcaagaattagaaaaaccgtaccaaccattactaaagaccgaattttctcacgtgatattgaagggttagcagctgatttcaaaacctttgtgcaagatactaattatgaattagcgctttaataaaaagttagtttaacagtttttcatttttatagaggaggaaaacgaaatggagacaaaacaaagtggaataaaagcacctcgtggaacagaactaacgacaaaaggctgggtacaagaagctgctcttcgcatgcttctaaacaatttagattctgaagtagcggagcatccggaaaagttagtcgtatacggaggaatcggaaaagcagcccgtaactgggaggcgttcgatcgtattgtcgcagcgttaaaagagttagaagaagatgaaacgcttctcatacagtccggtaagcctgttgcggtttttaaaacccacagtgatgcaccgcgtgttttattagcgaattcgaatcttgttcctgcttttgcaaattgggagacgttccatgagcttgataaaaaagggttaatgatgtacggacaaatgactgcaggaagctggatttatatcggaagccaaggcattgttcaaggaacgtatgaaacatttgctgagtgtgccaaccagcattttaacggaactttgaaaggaacgattacgctaacagctggattaggaggaatgggaggcgcacagccactagctgttacgatggcaggcggggttgtaattggaattgatgttgatcgcacgcgtattgaaaaacgtatcgaaacaaaatattgcgatacggtagtcgaaagtgtagatgatgcaatcacgttagctgaagatgcaaaaagattgggcaaagcgctttccattggattagttggaaatgcagccgagattcttcctaagatgatagagcgaggatttatcccagatattgtgacggatcaaacatcggcacatgatccgcttaacggatatttgccgattggagtcagcttagcagaaggagaaagattgcggaatacaaatccaaatgaatatataaaacaatcaaaagcaagtatggctattcacgttcaagccatgttagagatgcagagaaaaggcgcgattgcttttgactatggcaataatattcgccaagtggcgttggatgaaggtgtcacgaatgcatttgatttcccgggatttgtcccagcgtacatccgtccgcagttctgtgaaggaaaaggaccgtttcgatgggtcgctttgtcaggaaacccagaggatatttataaaacagatgaagtcattttacgtgagttttcggataatacgcatctttgcaactggattagaatggcgagagaaaaaattgagtttcaaggattgccggctcgtatttgctggctaggctacggagaaagagcgcgctttggaaaaattattaatgatatggtagcaaacggagagctgtcagcgcctatcgttattggcagagaccatctagatgccggttctgtggcttcgccaaatcgggaaactgaagcgatgaaagacggcagtgatgcagtagcagactggccgattttgaatgcattagtaaatacggcagcaggcgcaagctgggtatctgttcaccacggaggaggagtaggtatggggtattctcttcacgctgggatggttgtagtagcagacgggacggaagaagcagccaaacgtctagaacgtgttttaacaacagacccaggcatgggtgtagttcgtcatgtagacgccggctatgataaggccattcaaactgcaaaagaaaaaggaatacaaattccggcgttaaatgaataaaaaaggagggatacgtatgactattacgtatatcaaatgtgctgcacaagtcattacggttaaaggaggaagtcagcctagacgatcggaggaaatgtcagatctaggaatcattgaaaatggcagcgtactcgtgaaaaatagaagaattgtatttgttgggcctgacgtcaaagcgcaggaataccttgagcatattcatgaacctattaatataattgatgccgaaggaaaaatcgtaacgcctgggttgattgatccacacactcaccttgtgtttggcggcagtcgtgaaaaagaattagaaatgcgcttaaacggggcaaagtatattgatattttaaaagcgggaggaggaattttacaaacaaccgttagtacacgacaagcaacagaagaggagctaatcaagcaatctacaaaacgtttaaataaattcctgcagtacggagttacaactgtcgaagccaaaagcgggtacggtttaaatctcaaagatgaaatcaaacaattaaaagtagcgaagaaactgaatgaacagcatccggtagatgtggtttcaacctttatgggagctcatgcggtgccagttgagtacaaaggcaatgaagatgagtttgttcgtttcgttatcgaagaaatgataccaatcgttgcaaaagaagagctagcggagttttgtgatgtgttttgtgaagaaggcgtgtttacagttgaacagtcagatcgtattttacaagctggaaaagcatacggactaaaacctaaaatccacgctgatgaaattgtttcttttggcggtgcagaattagcggctaaagtgggagctgtgtccgcggatcatttactaaaagcatcggatcaaggaattaagcaaatggctgaaagcggagttatagccgtcctattgccgggtactgcattctttttaatggaagagccggcgcgtgctagaaaaatgatcgaagcaggagtgccggttgcgttatcaacagatagaaacccagggtcttctcctacggaatcgctgccgtttattatgaatttagcttgtttaacgatgaagatgacgccagcagaagtgttaacggcctgtacaattaatgcagctcacgccatttgcaaaggcgatcaaattggaagtattgaagtagggaaaaaagccgatttggtgctatttgacgctccaaattatcaaacgctacaatataactatgcggtaaatcttgtagacacggtattaaaagatggaaaagtagtggttgaaggcggtgttttgcatgaactatccgtacccacagcttgatcgtccacctttttgctggcagcgtcaaagcactcatgacccaaaagtaagcgactggattcaaacagttgaagatgggagcgacttcgactttccatcgatagatattacggtcttaggtgtgcctctttcaaggtcttccattagcgcttctggagccagtgagacgccaatggccatgaggaagctctggaaatcctttaatccgtatcatattgagtatgatacggatttgacttccttgtcagtgttggatttaggagacgtcaagcagcacgtcacggatatagagaaatcccatcagcatataaaagaagcgatgatgtctatgcggaaatgtcatccgcatgcgctgcctgttatgcttggaggagatcattctattacagctatgttagtaaaagggtggaaagcgtcacatcctgaacagaagatagggattttacagtttgatacgcactttgacttacgcagtctagaagataatgggccttctaatggaacacctatacgaaatttaattgaaagcaacacgattgatgcaagacatgtatggaatattggacttcacgggttttataattcaaaatcgttaaaggaatatgcagatagtaaaggcgttcattatgtaacgttactgcaagcaagaaaagcgggaataactcataccgtgaaagaagcattaaaacagctgagcaaagaggtagacatgatctatttaaccgttgatatggatgtgttagatatcgcttacgcaccgggagttccagcaggaacgacaggcggaatgaggacagatgagttgtttgaagcagtatacaccgccgggagtcatccacttgttcaagcaatggatattgtatgtctagatccgctgcgtgatgtaggagaaattaccgtgaaagcaggcgtacacgtgtttttgaattttttaacaggcgttgcaaacagaaagtaaggaagtgtgcttccttacttttttatatggctatttttataagattcataaacgattgttgagagtgggataaaataattttaggagtgtgtaggggttttagtaaatatatttttactaaaataaacgatttttattgtttttattcgaatttagtaataatatatttactaaagaaggtggatatctcatgaaggaaaaactggctaaggaatatatcgctttaataccagttttatttgaaagctttaagaacttaaacaagaatgaagtgaaattaacacatttacaaaatcacgtagttgaatttatgtatatgcaaaaaagagatttgaatattaaggaaattagccaagggttaaatattgccaaacagcagttaacgaatgttatcagtgaattagtaaatgaaggatatttaatcaaaatgcccgattcgcgagacaagcgtgcagttttagtctcattaacatctaagggaaaaagtattcaagaggaaaaatggagagggatttatagtaattttcatacaaatcttgcgaagttaaatgaagaagagcaattagacctgcagtttgctcttcataaattaaatgttttgttaaaaaagatggagggataaatcatgagtcaaagagaacgaatttcacttattagtgtaggcgttataggcggaacagtaatgggagtaatttataaagatatatccaactgtttgattacaggtgttattgttgcttcaatcattactgtaatgcttaatcaaaaagcgaaaaaaacagctagatagtatgaataaaagtaagacagcaccagcaagtggcaaactctgctatggtgctgtctcacttttataaagtcatgaacattacgaagccgaatatgttttaagagccttaatcattaaatcccaaaatccgtctacatcaagggttaaaccaaatttcgcattgggtttccttcctgttactcccagcaaatcaactgaagtcgttccagccgtgtattctccgcgtgtttctactacaatattaacttctttgaacgtaaatagctctggagctacgcaataagcaacggtcaatacatcgtgaacgggagggccgtcaaagtcaaaggtttctttataggcagatttaaaaaatgctaataattccccgaccttttttgctacgttattatcaatgttcatcacctggttaataacattatctgttgcaacggcttgatgggtaatatctaaccccattactaccagtgggataccgctatcaaacacttttttagccgcttccggatctgcccaaatattaaactcagccgttggcgtccagttcccaaatgttccaccgcccataaggataatctcttcaatgttttctttcatttctggagcttttattaaagctaaggcaatgtttgttaaaggtcctgttggtaaaagcgtaacgcgatcttctgactctttgatcattcgtataatagtatctactccgtgttcttcgctccagctgcgagagagagccgggaactcagggccgtctaatcctgaatccccgtgtatactaggcgcattttcacgtctgcgcatcattggttcgcttgctccttttgaaacaatcacgttatgtaatgataccaaatcacacaccttcaaagcattcatcgtcgttttttcaatttctgcgtttcctgaaacagttgtaatggctaaaatatctaattccggttgtgcggcagccaaaataatagcaatagcatcatcatgacctggatcacagtccataataatctttcgttttttcattatgatcacctctatagaatggataaattgctgctaatgttgcagggattttattttttctaaaatagcttctgtaaactccgacgtagaggcatgtccgcctaaatctttcgttttcacttcagcttggagcgtttgataaagtgcgtgttctactgtagcagccacttctgtaagtttacgatccgcatgtttttcagccagccatttcaatagcatggctgctgaagagataatgccggttgggtttgctatgttcaaacctgcgatgtctggcgcagaaccatgggctgcttgggccatagcgatatgttcatttgcattaagagaaggggctaatcctaagctccctacaagctcgccagctaaatctgaaagaatatcaccatacatgttttctgttacgatgacatcaaaatcggctgcacgacgtacgagatgagcagccatggcatcgatatggtagtcgtccacctttacttcaggatattgcgcagctatttctcgacaaacgtttagaaatagtccggtacttaatcgtaaaacatttgctttatgtacgattgttacttttttacggcgctgcatagccaatgcaaaagcttcatgcgcaattctttctacggcttttcgcgtaaatacgccggatgtcaccacaacgtcttttgtaatttgccattcaccgtgcccagaaaacatatttctatcagcatagaatccttctgtattttctcggacaatcactaaatcagcttctttcacgacgcttttaatacctggcattgttttagcagggcgaatattcgcgtaaaggtctaaactgtgacgaagctctccgctaggattacgcttttctttgtgcttgagaggataagcagcagaatcgtgcgggccaagtatccatccatgcgtatgttttaaagcatctattgttacttctggaagaggatcgttatattgtttaattccttcccatcccatcggcagatgaatccattccatttttactccagctttgcaagaagcatttttaactacctgaactgcggcgtcgacaatctccggcccgatgccatcacccgccaataccccgatacgataaacagtcattgttttgaacaccctttcattatgcgcaatgcttttataaatagattgaaggtttatagtattaatctacttaaagaaaagacaataataaaatagtatttttttatgtttatagattaaattcttttatctttctttttgatgcttttttaaaaaaagaactagctaatgcttcatgctccagattttctatcaaacagcttcttaattggcgctgttaaatttttaaaaacacccaattaacacctaaaacacgatttaattatatcataattcagaaaattaaacggttttacgttggcacgaaaattgcttgtactgtatatgaggaatgcaaaaggaaggagcaatatggagctgcagataaggaatctgcttttaaagaacgggatgtctgtttaaagctattatttcataatgaaggggagaagaagaatgagtgaaccgcaaaaagaaatgagttcattaaatcaggtacggaaaaaagagaggaaaataaacgtttttgctttattgttaggatttcttgtgattgctaccattttaacgtatatcttgccagctggagaatacgcacgcgtagaagtagacggaagaacaacggtagatcctcagtcgtttaaatggattgattctacacctgttggattctttgatatggtcaaagcgatacatacaggaatggtagaaggagccgacattatcttttttgtattaattatcggcggtttctttggcgtactaagcgctacggggacagtagatgtattaattacaacgatggctaaaaaacttgctacccgagaaaaattattaattcctgttatgatgctgttttttgcggtaggcggttctttaatgggaatggcggaagaaacgctagcctatattcctcttttaattccgctggcacttgctcttggattcgatgcattaacagggactgctattgtgttaattggcgcatcggctggttttactacggccgttatgaatccatttacagtgggtgttgcacaaggagtagcagagcttcctatgttttctggaatgggctttcgactcatcttatttgtagttgtttatgctgtttcagtatggtttgtctaccgatatgcgatgaaagttaaaaaaagtccttcgattggaacatacggaaaatacagcataactaatgcaaataaactcttaaactcagatgcaaagttaactagaaagcataaatggattatggcagcatttcttattaactatgtaattcttgcttttggggttattaagtataagtggtacattaccgaaattgcctctctgtttgtcattttgactattgtgattggggttattgggagactgtctgttgaaaatacagttaagtcgtttacaaacggggcagcagcattagttggaggagcgctagttatcggagtttctcgtgctgttcttgttgttttgaatgaaggtcatattgtagatcctatgcttcatcaagtatctggaaccattcaacatattccgggatatttaagcgtcattggaatctataacttccaagcgctgattcaccttattttagcatctggaacaggtcatgcgatgctgacaatgccaatcatgacaccgcttgcagatttgcttgatattacaagacaaacagcagtattatctttttcttttgcagacggcatcggaaacattattttcccgacggctggaacattaatggctggcttagcgattgcgggaatttcatggacaaagtgggcaaaatgggtgctgccgttagtccttattcaatatgtgattggtctaatagccgttgtgattgcttattttatcaattacggaccattttaagcattaaaattatatagaaaaatattattcgcaagtcgagcttactagtaggaggaatagaagttgttaaccttaatcaaaaacgcagaagtatatgcaccacagcctttaggaaaaaaagacgtattacttgcagacagcaaaatcatccttataaaagattatattgagcatttaaatacgtccattcctattgatgttgtagacgcggctaatcacattatagctccaggcttcattgactcacatgttcatattattggcggaggaggagaaggtggatataaaacacgcactcctgaactaatgttaaccgatgcaacgactgccggtgttacaactattgtaggtgtacttggaacagacggtacaacaagaagaatggaaaatcttctggccaaagcaagaggattagaagaagaagggattagctgtttcattcacacaggttcttatcaaataccagtaaaaacgttaactaccagcatcgaagaagatcttattttaattgatgaaattatcggagtaggtgaaattgccatttctgaccaccgttcctctgaaccgacatttgaagaactggtaaaggcggcttctgctgcccgcaatggagggattttatcagggaaagccggaatattagaagttcatgtaggggatggaaaacggaaattatctttattaaatcaaatcgcagatgaaacagatctgccaattcgtcagtttcatcctacacatattaatcgaaatgaagaactgtttaaagaaggaattcaatttgcaaaacgaggtggctatgtagattttacaactagtaccattccatattttttagaagaaggcgaagttaagtgcagtaaagggttacgtatcatgcttgaagaagaagttccaatctcgagcattacgttctcatccgatggacaagcgagcctgccgttttttgatgataacggagactataaagggcttcaagttggaaaagtgtcttctttatttcaagaagtacgagatgcagtattagaagaatcagtgccgttagaaacagctcttcaagtcattacttctaatcctgccaaagtattaaaactgtccaataaagggcatattcaacctggaaaagatgcagatttagtccttttagacaaagagacactaacaattaaaacagtttttgctcaaggtaaagtaatggtaaaagacggtgtccctgttgtgaaaggaacgtttgaataacaggttttaaacatcatttaacgaaagtatcgagaaagaatacgagctagtcagagaaagatattaaaatttgcgtggaaaggatcttttaaatgaaaaagaaacttgtttcatgtcttatcagctttacattactttcttctttgagtacaccgctgcttgcaaaagcacaagaaaatactgaagacattaaaggcagccttgttattgcaggcggaggtatagggacatctaatcacgaaatctatgaaaagtttctctcgcttgctggaggaaaagaaaaagcaaaagtagggattattccagctgctagcacaacgctgcagtcttctaaaaagtttaaggaagacctcgtaaaatacggagcaaactcagattctattaaaattcttcccgtttcaaatcacgatttttctgatacacaaaaggacgaatcaacctggaagaatcaagtaaatgataagaagttatcccgtacgattaaaggactaacggcagtttggtttgttggaggagatcaaaccaaaattgtggattctcttcgtcaaaataatggaagtgattctgaagcgttaaaagctatttgggatatatatcgtaaaggagcagtaatcggaggcacaagtgcaggagctgcaattatgagtgacgtcatgattacaggaggagacagtctaggagcgttaaaagacagtttagaaaacaaggaaaataaacatgtaagcaaaaaccaacgcagtcaaaaagagtacgagcctctatcaattcaaaaagggctggggtttttccaacacggcataattgatcagcacatggatgaacgagcacgacttgggcgacttgcagtagctgcatatacttctgaacgtgacaaagaaaaaaactttgcatacggtgtggacgaagatacggctatggtcgttaacaataaagatcaaaagattgaagttgttggacgaagcggagtagccgtcttggatatgagcaaagctgagcttgtatctaagcagaaagctcgttcgggattagagaatataaaggttagttacttatctcctggagataaaattaactatcatttaaagtcatttgaatttccaaaagagagagtagaaacgaagggatttgaatattactcgtttaacgcactgcctgctacgggtgtttttacgccatatggaagattaaaggcttatttatcctattctcttgttgacaatgaatcgatgaaatctgcgaaaagctatgtttatgacagtaaagggtcgggatatgaaattgcttttcaaaaggacaataatacaaacggctactggagatatactgacggacaaaaagatgactattccattgtaaatgtcaaaatggatattacgcccaaaaccttcaaattccaaccggatagaaaaactagtttaacgtataaaaaacctactttttcttcatctgaaagtcctgcatacgattcgattaaaggtaatctcttaattgcaggaggagcgcttggcagcagcaattcaagcgtgtataacaagtttattaatcttgcaggaggaaaacaagccaaaataggaattgtgcctgcagcgagtactaagttcgactcttctaatcagtttaaaagtgatttaattaaatacggagtgaaagcagaaaatatagagattttacctatttcgaaccatgactttaaaggaacttctgaaaatgagtcgacttggaaaacaaatatgaacagtgataaactagcgcaaaaagttaaagggctaacgggcatttggtttgtaggaggagatcaaaccttgattacgggctccttgcgtaatgaaaatggttcggactcaaaagttttacaagctatatggcatacgtataaaaacggggcagtacttggcggtacgagcgccggcgcggcaattatgagtaatactatgctcgcaggcggagatagctacggagcgctttcatacggatttacaaacacatatgatgatatgaatcagcaagaaggcgggcctgcttatttggaaaaaggtcttggctttttccaatacggtcttgtagatcagcattttgacaacaaagcaagactcggacgtcttattgcaacagcatatgaaaaaggaaataaaaatcagctttcatacggaattgatgaagatactgctatggtggtaaataataaagaaaaacaaatagaagttgtgggaagaggcggtattacgctagttgacttagcgaaggtacaggcaaatgacaaatttccgagtgactacaaaaatattcttatctcttgtatcactccaggcgacaaagtaaatctcacaacaaaagaaatcgtcataaacccagctaaaacatctactagaaaaaatgaatactacagtgaaaaagttggaccaaatacaggtcttttctctccgcacggtgtactaagaaagtttttagcttacgatcttgttgataacgctcagagtaaagaaataaagagctatgcgtttaaccaaaacaaaggttttgagcttaccttccgaaaaagtgctgaaagcaatggttattgggcttatacagacggtcaaaaagacgattactccattgtaaaggtagccttagatatcaaaccaatagatgtagatattagatgaaaagaaagtaattcaatgcatctagcactttagcatattgtgcctccacctattaaagcggaggcacttttttctacttatttttatttacaatagggacaaacgtccgctagatgaaatgcagggcaacgtataaaatgataggtacagtattccaagactaatctctgaaggcaagcaaatttaaaggcctgtagaaaggtgttcatacgatgaaaaagaaattagttttaataacaggaagcaagcaaactagaatcattttgcacgatcaattaaaagagttgctagacgattacatttttattgaatgctttgcgattgacgaagaattaccgggggaaattgatggcgatgttgtcctctactcatcagagagtataaagcacgaaatgaaggacagattagacgttcagcatgcacatgaaattgtagggaatagaacgattcaccataagcatataaatgaattgctgcaaatccccgcccatacaaaagtattaattgtaaacgatgacgataaagaaacccttaaattaatagaatctctctatcaagtaggtattaatcatgttcagtttattccttttaaaaagcaaaagacctattacgaaggtgtggaagttgctgtttctccgggtgagattcacttatgtccgccatatgtaaaacatgtaattgatataggcgttaggctttttgatatggcgaccatttttgaacttataaaatcatttggttttaatcagtctaatcattcaattatttgggatcgctatttacgaaatattattgagctgcaaaaaaagctaatagaagcagaagggcaaatgaaagaacttcacctccatgtaaagagtgttgtaaatgtagtagaagatgggatcctggccgtggatttcaataaaagaattacgttatttaataaaaggttagaatcattgtttcagctatcttcttctgatgttgtagatcgtgaaattcaacatgtcatttctaacgaaggccttgtggagtttattacatcgtccgacgagaaaagtcagtactttaacgtaaacggatacgaaatggttatctataagtctatgattcaggaaagcaatactacggtagcaacgtttaaaagtgtgaatcaagctgttgaaatagaaggaaaagcgcagtcagaacttagaaaaaacggcttttctgctaagtataattatcaagatattatcggagaacacccagctttgcttaaaacgattgaaatttcccggaaaatggcggttactgagtaccctattttaattcaaggagaaaccggtacaggaaaagagctgtttgctcaggctatccacaatcattctacacgtaaaaacggaccgtttcttgccgtaaattgcagtgccatgaccgatacattgctagaaagtgagctgtttgggtatgaagaagccagttttacaggagcccaaaaaggtggcaaaaaagggctgtttgagagcgctgataaaggtacgatcttcctggatgaaattggtgtgcgcccatacgggcatatagagaatctccttagacaagagatgggagtctgcgcttaacccatttaccgccttgcttacccacaaggggaaacccggaggggaccagagcatgcaaggaaagccctaagttaccaaagtgacctaggtacgactgaggggcaaggtaaaaaatgttatgaataaggatgaatgctaaactgcgtgaaccatagtccaaagtggagtatcgtcgcccgaagtgaagggtcattgaaacgcttcgcagtcaagaatggaaatattgccaaagtttccattgaacatacgtgatacgtatggcagaccaaagactggctaacttggataacaagtaacggacgaaagtggcatccgacatcataattagtctagtttctatatgtactaaatggggattacctaacttggaacgcctcgtaaggaggctattgaggatgataccaagtgtaaaaagcaaggtatgtggctcatgaaaatccaatatggtaacggagttctcgtagtagtcagagcgagggaaagcctcgtacaaggcaaaggagaacagtcttttcgactaatattaaattgggaaggggcgtgaggctcttgcgaagcccaaaaatcgtattaggaaatctagcatctcacagtaacaaagcaggatataaatacaaaaaattatatcgaaatctgtataacccattattttttcttgatgcctatcaaaatatatacgccagcgaaggaaacatgactgctggaacagatggaaagaccattgacggaatgtctacagaaagaatctcagcactaattgataagttacgagattattcttaccaaccaaaaccagtaagaagagtttatattccaaagaaaaatggaaaaaagcgtccgttgggcataccttccgtagaagataagttagttcaagaagtcatcaaaaacctattacaatccatctatgaaccaacctttagtaagttctctcatggctttcgccctgaaaaaagttgccatacagcactaattcaggtcaaaggaacctttactgggagtagatggttcattgaaggtgatatcgaaggttttttcgacaatattaatcatcatatccttatccataccctaaggaagaggatagatgatgaacaatttatttcgcttatatggaagttccttagagccggatatttagaggaatggaagtttcataaaacgtttagtggtgcaccacaaggtggtattcttagccctttactagcaaatatttatctaaatgagttagataattttataaatcggtataagtcaacttttgatgtaggaaaagttagaaggataaacccagcttattctaaaatacaacatcaaataaacagggttaagaaagaactgagggaatccaaggaaatagatgaagtacgggaaaaagaattaaccaataaggtacatgagttgttagctgaaagagaacgtattcctcaacgatatccgatggatgagaattataaacgaatccaatatgttagatatgcagatgactttctcattggagttattggaagcaaggaagatgcgtacaaggtaaaaaaagacattgctaatttcttgaaatcagaacttaagctaacattatccgaggagaaaacacttataacaaatacgaggcataaggctcgatttttaggatatgacgttaaagttttgcgagattttcactctaaacgacgaagcgatggaataaaaacaagagcattctcgttaaaatgtgaactatatatgcctactgatcttgtttatagtcgcctgtttaaaaaaggggtaataaaggtcaaccaaaagacaggtcaatggaaaccaatgcaccgtccagagttaattaaattggttcctcttgagattttaagaaactataacgcccagatacgtggaacctatcaatattaccaactggcagttaatgtgtgccatctaaacagttataagtatcttcttgaatattctatgtacaaaaccttagcaaataagtaccgtactaccttaggtaaagctaaacaaaaatttatggtgaacggaatattccaagtcagttatatgacaaagtccggtaagaaaacggaagtgctttatgataagggatttcgtaggaataaagctcctataactaaaaaggatatagaaaaacttccttcggaagtatcataccaatcccgaacatcgcttatccaaaggttgatggctaatcaatgtgaatggtgtaaggctgaagaaggctcaatggaagttcatcatgttcgaaagttaaagaaccttaaagggaaaaagaaatgggaaagacagatgatagcaagaagtcgtaaaacgatggtactttgtcgaaagtgtcatcatgacctgcataatgggaagctagactgaaaagatggagagccgtataccttgagaggggtacgtacggttcgggggggagttctcggaaacctaagaccgagaggtcttaaggcgccgggttcttaccctacgatatcagtccgcgtttacaaactcagcttttaagagtgcttcaagaaaaagaaattagacgggtaggagggacaagagttattccgatcaatgtaagaataatagcagctactcacaacaatttactacataaaatgaaagaagggttgtttcgagaagatttgtactatcgtttacacgtattatctttaacgattcctcctttaagatatagaagaaccgatattcctttactgattcatcattttatttctaaatcaaaaacgtggacgcatatccatccagaagcgatgaagctgcttatcgaatacgaatggctaggaaacataagagaattaaaaggagtcatcgagtatttgcttactgtctgcgatgaaaacgaagtgaaagcaaaagacgtagagtataggcttagtagtcaaaaggaggagcatactttacatgaaattgaaaatgaatcggttgacttgatcgaacttcaagaaaatcacgctctgttagaaacgataaagcagtgtaatgatacaggaaaagcagcaagcagaaagtggattacacagcatttaaaaggctttactcttacagaacagcaggtgagaaatcgtttggatgtactagaagaaagagagtatattataaaacgcagaggcagagcaggaacgaaaataacagaaaaaggactgcattatctatatcatttaaaaacaaaacagcacttaatcaatccttaatatacggaagaaagggaaacttcactaatcaagtttcccttttctataaaatagtgtcgtcatagacttggcgtttacggctgatttcctccgtatacttttcctgtagaggaagtaataacaccgccgtttacgtttaaagtataagctaaccctccagaacctgtccaagtggaaagattaaaagtgctgccattaaatagtttatagatagaaacgttattaaacgtcagcggctgaccgcttatacaagtagcaggcgccttattcgttttagctagataaacagctgcgtttgtagagcctggctgtgttactactttagctgaaccatctttttctaccagaagcgctgactgttcattaacagcaattcctttggcgcttgttccagtttcttctccgtcttggatattacgtgcaagaaatgttaaaaagcgtcccattctatctcgttgttcaaaatgagtgtctgtttgaatgttattattatgcggggtttgaatcaaataatctgtaaaagaaataagagaactatagggattgtttagcgctgttttcgaatctaaagttgtagagcctgctgagatagagtcataaacgtgatcaccttgaatcatggtgccggcacttgttcctccaaaaggaatgccttgattaatacgattatttaaggctgtaagagctggggatccttctaagaaatctacgtaatcagcttgattgcctccagcaaaaaagatgccttctgccttgttaattttgtcaattaaagaagagtctgaacctgctcttattaaatcatcgacaacaattgtgctaacagagttaaggggcttacctatgcttttggcgaggtcatagatatatgaattataggcgtcagtacccgtcgctcttataaccaagaaatctccgccgtttgccttttgaatcatccatttgaatgcttcatctacatcgatgcttccgcccatatagacttgtccgaagcttgtactagtagctttgtctgcagtacttccgacttgataaagcgtataaggtgcagaagcagcggaagtggagattggaagtaaaagagatgccgcgagaacagcacaagtaatgacctgctttttaatacttttcttacgttcagcttttttcataaagttctcctcctttaataagtattcataaatgaacatgcaagttttataccaacttattgaacaccggcaaaatagtgaaagaaggctttttttaaaagctctatgtgtaatataggttatttatgggtcattattaaggttttttacacccgaaaaatggcgagaacgactttaacttggatatctaatagtgaaaagaaattgcaaaaggtatattacaagattacatccctcattgaaaaatcacctttaaaaacttaaaattataatagaaaggaaaaacaaggataaaaagaagagctgtccgcaatagcgccttatttatcaaacagaccttcattctatcaatatcttcatctcttaaacattttccaccagcatttctacgcagaaaaattatacatgagaggatctgtcaaaatgaacaaacaggaaagtagctacagatgggttgtttttggaaccgctttattagcgtattatttgattgtcagtcaacgaacagcccctggacttattacagaacagttaatgaaagattttcacgtttcagcgtctgttataggattaatgactagtatacaatttttagcatatgcaggtcttcagattcctattggtttactttctgaccgatacggtcccaatcgatttttgattatagggtcgcttttaacgggaataggaagtcttatctacagcacgtctcctaacgaatatgtgttaattttctctcgtttactagtcggtacgggagactccatgatttttgtcaatttagtgttaattttaagtcagtggtttaagggaaatgagtttgtaaagctattaggtttaattgggctggtaggaagtgtaggttcattatcagctaccgtgcctttgtctatgtggatttcattttcaggctggagagttccctttcttagcataggtctagttttaatggcggtatcctacctgctttatgtcgttttggtggtaaaacctaaacgattatttcaagatgatgctaaaacaaataaatcctctgttaagactccggaaagtgtatgggcgatcctaaggagagtgatgacgactcgccaagcctgggcaacatttctttgtcattttggtgtagttggtacatatatcggttttattggttcttggggagttccttatggaatgaatgtgttccatttatctcgcgctgatgcaagtcagcttattatgtatggtctgtttggcgctatgattggcggacctttaatcagctggatatcaagcaggttaaattccattaaaaaaatttattcacttattcatcttattgtggtgtttagctggactgggttattactttccggcgtgaaaccttcattcatgctagtcgttattttgctttttatcatcggcttcggaaacggcgcaagtgctttgacttttgccgtagtacgtcaatctttctcactaaaagaagtaggagttgtatcaggttttgccaatatgggaggctttttaagcgccgtattattacctagtattttcggaaatgtcctggatttattccccgagcgttcactgcatgttggttatcattatgcttttatgattcccattttgttttcaatgatggggttgttaggtgtcttactaattaaagagaaggaaaaaaaggagcagaaagtgctgaatgcttcttaatgtcttatataatgagaatgagagacacgcaaaaaaacggggctgtctgcgcccactctgcgatactacgaaaagaaaggtattttaccgtttatcgaacgaaatgaacatgatcagcttctatacaacgaccagaatatcgagtgggtcaagtttgttttagctttacgtgcaacagggatgccgcttgccgagattaagcagtatatagagtcatataaaaaaggcgaaagtacaattagcgaacgtagaaacatgatgcttcagcataaaaagaaagtggaagcagacatggcacaaacctatctgcatttagaacgaatcaattataaattagcactgtgtgatacgttggaagccggtttaaacaataaacaaataaaaatctaaatgctgataacaaagaggctcctctttatacacaagctatagacctcagatgtaaaaagctaggaaacaaagaaaacaagataactgcccagttatcttgttttctttgcactattttaatatgtactgcttaaataaagagctacatcgcgaattgctttatcagtttcactttccattaactctctgttctttgtatacgaataaagagtgtcgccgtgaagaaggtggtctgataaatttaataagccgacagcgcgcttattaaatttatgagcaatggccaaagtagtagctgtctccatatccacaccgagaaaacctgcaagcgaccattcctttaccatgtcatgcgtctcgatcagcatggcacccatactgaccgtatgtccttttatatagctgtagcctttttgttcacaatatctacaggcggcttccactagctctttgtcagcttccacaagcgtttgttctggtaaataccagtgtgatacgccatcctgcatttttgctgcagatacaattaagatatctccatattgtacagtggaagataagcctccaaaatatcccgtttgaataaataagtcggttccgctgccggcaaattgatgtacgatgtttgacgccatcggactgccatacacatttgcaaatcctatatttctgttatttaacttacctattaccgtgttccatttaggcatatgcacatcagtggataagatctctttccataaatttatattatcttgaaatacccactcaccatgaataataaatgcattaggcagctctttttctgatagctttaatacatttagccaatcttcttttttaaaatcaccatacagcttcatctttttctccttattatctcatttagactagttagaaaagaattcttcattactagctttcattcctttaatttttataactaacaaatataaaagaaatgaaggttctgattttaaaatgaagttatacgtgctttttttactcatttctcgacaaatatttagtattaaaaaggaattcagtaataataaaagaaatttcttattagcggttatttaaattagataaagctgtgagaaaagatccgtttagttaatgaataataggagggaaggtacaggtgtcaaattattttcccgtcattaaaacaaaaaggcttaccctaagggaatttgaaacagaagacgcaagcaatattttaaaatacttatctgataaagaagtaatgaaacactacggactagagccttttaaaacggttgaagatgctttaaatgagattgcgtggtataaatcaatcttaaacgaaaaatctggaataagatggggtattactcttaaagaacaggatgacattattggcagctgcggatttcttaatagagttcataaccattaccgtgcagaaattggatatgagctaagcaaagattactgggggaatgggattgctaatgaggcattgggcgccgttataaaatatggttttacacatttaaatttgcggagaattgaagcattaatagagcccgctaatgctgcttcacaaaaattaataaaaaagcatggctttataaaagaaggtctattaagaagctacgaatttacgggtgggaaatttgatgatttgtatatgtattctttattaaagcaagactttgagaagcttcaagcttagataacgacattgaaaatacaaatagcactatgacagggaagggggaaaatgtatggcccattttaatgttgatattgttcactatcatcctcaatttgctgaggcaacggtaaaaatgtggagagatagtaaagaaaagcgattgaacaaatggaaatgcacagttttgactgtcatgtctattttttaaatcatatattgtcagcacactataaaattgaattagcgttaatggatgaacaaatagtaggaatgattgcttatcatgctgatgaaattagccagctgtacgttcatgtagattatcaaggaagaggaatcggacagcttttactcgaaagagccaagacagaatcaaatggaaaattaatattacgtacattcgaacgaaataaaaatgcccagaggttttacgagaaacacggcttcagtattataaaaagaggatgtgaaaacgaagagcaattacccgatattacatatgaatggacaagcaaatgaagcatacgtaattttaataaaggagcggttagtgtgaatacgttagcacatgaaacataacaacgctgtctatatgtccgtggtccgccttttactagtttaggatagatgattaatgctagctataaaaaggaggagtttaatatgataacggacaaacattttttaaacgctgtaaacaatacaaacgttgattttactggatgggatttttctattattactcgtactggtcatatggatagcgacatgctttcgtggtcatacggaagtgaagcttttcgtcttattcaaaactctaatgtcgctttagatataggaacaggaggaggagaatttttatctttgttacagccttttcctcgcgttatgtatactacagaaggataaaaacctaacgttccaatcgctaaaaaacgtttagaaccgcttggtgtcaaagttgttgaacgaactgaagacgaaaacttaccgtttaaagatgatacatttgatttgattttgaaccagcacgaatctttttgtgcttcagaagtaagaaggattttgtcaaaggaaggcacgtttttcacgcagcaagtgggagggttagactgttcacgaatcaatgaatgtataggggttccaataaataaagagttttgcaattggaatttaaagaaagtaatagaagagcttaaacaaagttcttttaacattatctcttgcaaagaagagtttcctgtacagagattttatgatattggagcgcttgccttttattattaaagctgaagcaaagtaaatagtgtaaactaatcacatataaaaatcggatctctaactggagatccgatttttatatgtgaatgatgattgtacataaacgttctatttcagttatgtaatggagcgtttatgatctttagtatgattttgtgatatacgagagtttgttaaaatgcagtctaatgctcttttagtaatgggcataaaaaaattaagcagcacgccgcctaaaaacacggttaataacgttccaacaccaattggtccgtttaaaatcattgcagctagtaaaaatgtgaagtaaatcaatgttcttgcgagaaataaatttgttttaactagtttttgtatgattaatgttaagcgatcaattggaatgggtgcaaaatttgtatgtaaataggcagaggttcctacacctataatgattaaaccaattccataacaacataatttgctgtaccatatctcaaagggagcccaactctctaataaaaaaagccatatatcaataccaagacccgtaatgaatgcggtcaacagtcccagtacttccggcttttgtttgcttaaaagagcattgacgcaaattaaaacactggcaagtatcatttcccagcttccaacgctaagacctacgtttagggatagtccaactaaaagtgcatcaaaaggtgaagctcctaggttggattggatcgtcaaagcaattcccagagttaatagtaaaattcctcctgcataaacaacatatttcactgtaatcagatcctttattcattattttttgttgcaaatgcaactattttcaggtacattaaacgtatattatttttattgtatttgcaacaaaaatatgtgcgaaggagatatttatgagtgaaattctgcgtgaaattggaatgatagcaagagcattggattcgattagtaatatagaatttaaagagtatgacctgtctaaggggcagtatttgtatttagtgcgaatatgtgaaaatcccggaatcattcaagaaaagttagctgagatgataaaagtagatcgaacaacagcggctcgggctataaaaaagcttgaaatgaatggttttattgagaagaaagacgatctccacaataaaaaaaataaaaacctttttcctactgaaaagggcaagaacgtatatccgtttataaaaagagaaaatgattattctgataaagtggcattagaaggttttacccaggaagaagcagataccattcttaagctggttcaaagagtaaggaaaaatatagaaacagactgggagtttgtcaaaaaaggaaataagagaaattattgaggatataaaggagaggcgcatgtcagtgatgatggatataaaaaaatgtactcttgaagatgtaaatcaccttaaaaatattagctacaaaacatttaatgaaacgtttaaagatcaaaattcacctgaaaacatgaaagcttatttagaaaaagcatttacagtcgaacagttagaaaaagaactatcaaatacgtcctcgcaattcttttttatgtatgttaatcatgaaattgcaggttatttaaaggttaatacggatgatgctcaatctgaagagatgggggaagaagcgcttgaaattgaaagaatttatataggtaacagctttcaaaaacgagggcttggtaaacatttatttaataaagcagtagagatagcaacgacacttaataaaaagaaaatgtggttaggcgtgtgggaaaaaaataaaaatgcgattgctttttacaagaaacagggatttgttcaaactggatctcactcgttttatatgggagacgaagaacaaatagactttattatggttaaaacacttttatagttttttaaaagataaataaagtatgataaggattattcactaatttaactggtagaggataatccttattgcatacagaggttttatgatttttttcaaagcagatgcttttagggtaagcagtaagcaaactaatatggctgctgtgccagcatataggagaatgaaattaatgtcacatgcttaccaaaacgttggcttttttcattttggaaattacatttttactttaattctatttgaaataacacatgttaattagatacatatcgaattagaaaggttaaaaaatgaacgtttttacgctcattttaaaaaataacgggccacatctctttcggatttaactcatattctccattttgcctatacataaaatgctgcataattaactctctgcgaatcgttgcataatcttcatgatattttttaatatgttcatttaattctttttcttgatacgtttttccgtgctgtaaatcacgtattaaataggctaatatcacgttctttttctttctttgacttggaatgatttttaaagtaccgtcactatttataaagtttttaacaatagataatttgtctttatcctgtaaatggttgtcttgattttccatcgaatcctctccaatacttaaaatagccttcgagttatattcaagtctttcaaggtctagataaaaataaacaatgttcccttgtcttctttgataaacaattcctacatctcttagctttgaaatatgatgagtgatagttgaaggctgtaaccccagtttgtaagcaattgcttgcccgtgaagagatcctttttttaatagtgaaataattctaattctggtaggatcaccaacggctttatggtaattcaccaacttatctaattgcatagctgaataccttctctctttaattcgatatacatctaattagatnnnnnnnnnnnnnnnnnnnnnnnnnnnnnnnnnnnnnnnnnnnnnnnnnnnnnnnnnnnnnnnnnnnnnnnnnnnnnnnnnnnnnnnnnnnnnnnnnnnnatatacatctaattagatattaatcgaattagatgtatatgtcaaaaaaatgaaaatatttaaagtgaagacttgtcacactgtatataaaatgctctgtataatctttaaactataaaaaagcacttatttcttcgtataatttcaccattatttttacctgttctttttattattaagaaaaagttaccatgttttcatcaaataataccggagaacatattcaaagagataaatgaattattaaagatacatgtatgtaaataataaatgaaaaaggaatgagtaaatcatgacaggaaattcaaaaattttaatggttgttacaaatggacatacaatggaaaacggagagcttgctggtatttggcttacggaattttctgaagcatatttagaatttaaaaaagaaggatacgaagtagtcgtagcaagtccaaaaggcggaacatcgcctgtggatcctaacagcttaacagatgatgtgacggacgaagacaaagaagcaggaaagcttttagagaatacaaaatcattagctgatataagttcacaagaatttgcaggtatgtttgtacctggagggcacggaacaatgtttgactttccagacgatacgcgcttacatcgtttgctaacagaatttgctgaagacgacaagctaattgcagcggtatgccacggaccggcagctcttgtaggcggaaagcttaaaaacggtgagccgattgtaaaaggaaaacgtattacagcgtttactgattcagaagagaaagatacaacgttagataaatacatgccgtttcttcttgaaacaaagcttcgtgagctaggcgctgagtttattgcaaaagataattggagcgatcatattgaagtagacggaaagcttttaacaggacaaaatccacagtctactatcagcctcgcaaaagaatttgtacgtgctttaaacgcgtaaaagtatgcatgaccttaatagggtgaaataaaataggaattaaggaaaataaaaagggcagctatttaaatagctgcccttttatttattagaagatttatttctgaaaatgtatgtagtaattcctgtcacaatgataacagctacaacacaaatgatcagacgaacaatctgtgtcacaaagatattatttgcaatactcatgtgtttcgttagaattaacgttccataagcagctaaaacagataaaaacatattgacgattcgttgagccatgttgtcgttactcctttcgcttcactactttacactttaacatatgtgctcactgtaaaaaatatcgaattacaagtatgtcagaaaatcagcactccaggaaaagaatctacttgtaaggaagtaggtgatattatattatttatggcgactaaacgcagttcagggaaagaaatgagattcctttagtcgaatttaacatgcttatattctttttttagataggtgggaaaagcttgtttgataaattgaaaaagctatttatggataaacaggatcaggaagcagatgacaaatacattttagtccctgagagtgaaataaatgagactttaaaaagagatatagtaaagttggaagaagtaggagaggcatactgcaaaagtcttcagcacaaatatagaagtgaatttgaacgtgatggtaagcagaacttaaaaatatgggtgtgccgagatattgatggcgaccaactaccaaatctaagttcgaagcagtgtttagaaaaagaatatcgttcccagattgcaataaactttgatggatttacagatgaagaagatgcatacgtttattacatccagttgtggtattacgttggtgggtattttaaagggacaggcactttgtatgatttgtcaaaaaatcatttagaagctgatattgaagaaaagttagaagaattactgaaccaattatagatttctacttagcactgagattatttgttaatacacagggggaaggaatatgagggggcggccacagttagaaatagaaagggaaaaagtttataaaacgaaaaaaaatcctaacggaacatttatagcgcgaattattcaagtgcctaaggaagaaaatatgttagattttatgctggaaatcaaaaatttaaagaaaaaggaactttcttatagaagtttattagtaaggactgaaaactggtactattcttttcgtcttgctagaggagatctgaaatgggtatctttgcatacagtagcggtatgggaccggctaggacataaattagttgaggtagcggctccaaccggtaaggaaaattatcgtatttccgatgaacactgttcagtttaccgagaaaagtaatagtgaccatatagttaaggagaaaacgaatgaaaaagcattgctgcgattatatgaattatcatgcgaactttacgtgtggtattcatagtgatccgtttgattgtccagataatcttatcttatttgataaaacaaataaggcatacggtttaattatccatgatggtggttcatccatcattggaatttcattttgtccatggtgtggtgcaaagctatgaattaagaaatgaagaggtatcttttgcttaagagatcctcttcgctcttggaatagggggataaaatcacgaacataaatcaaaacagttttactattgtattgaataagcctgagaaaaccttagcaagtagccatctgggtcttgaactataaattctttctgagtaaagccactatagttatttatcatagtgtctctaaaaagtgaaatattatggttctttaagttttgtaaaataacctctatattttctacttcaatttgaaaattaatccctcggccatatgggtattcaagttcagcagtttcccaatgaccattacattgctcaatcatcatttgtgctccgtttagtgaaataaatgtaaattggtcctcagtacgttcatagttaagtttaaatccaagtatctctaaataaaacttttttgatttgtgaatatcttttactgatagttctggtattaacttattaaatttcatataattgctcctttatttacagggctgctgtttgttttaataataccgtatagatataagctgcacacgccttattctttattacgtagaagtaaagccagaatttcttttatgttaacaaaaggtgtatacgatattcatagtagtttaaagccatagtattgtagatataaaataccgaaatgggggattaggcttgatcttacgttatctagctatgttatctgggttgggaatagctttattaaacctttttgatcctatacatcaagggattacgcgctggttaatggttatctgtggcttgttaatttttattagccatttaaaattcatcgtagataagaagtcaaaaagaatagataatcaaaataagacctactgataagattttcttttgatttagtcctgttgataaacggtgttatgtaaacgaaaaaatttttgaatatgtagagaaataaaagagagaattatatgataattatgaatatccaaataaaggaattatttattatgatcaatcgtaaatttaattctctatttatagtctatcctatcgttttctttgtagtgcgtactgttttttcttttgtgaaaaatagcgctgcggaatctgtctatgagacgttagctatacttgccatgtattactttgcagttagtgttttctattcgattgacttatatatgcaaaagaaaaatagttaataaattagaaagtactgagagccagagtaaaaacaaatgatataaaggagtctaacagtgcgcattaagaattattttgtgtttatttttctactcgttttactattagtagctagctgtgatccatcttctacacctaaagaaaaatactattcaagcaccaaaagcacaaaccttcaatcagaaaacgttaaggcagtatcaataggaaggtctaaatatgacgtagcaagttgtttgaggaagaaaccaaaatttatagaggttactgagcagcctccgtacactacctacatttatggaaaaagtacagaaaagtatgatgttgaatttaaaatagtagataataaagtcagcagatattatttgcttagtgacaagtatgctacagagaagggaatacatactggtgacagcaaaaaagatgttattagggcgtatggagaaaattattacgaaagagaagataccggagcaacaatagtagggtattttgataaaaatcataaattcaatattgagttttctttagatgacaaggataaagttggaggcattttggttcaaaaaatgaataattaagatgagtaataatcatttttgctgcagcttttaatatgtactcatttatgtaaattgagtatgtttgagctataaatctaaaacaaataaacagaaagggttttttcctattgagtacgtttactaaagtagtaccgtcagcttttatacttctctatatagtatttttctttttagatatttcttatcattatggtgttccttattcatatagcttttttctttttttatttttgtcgttaatatctctagtcttatgtttagtaatatggtttaaggacaaggaacgtctttttctatttttgagtgtagtttcaaccctccaacttacgtttactgtctttatttatcttttgccagaagcaggaactaaaccattaatttatgaaaaagtaatcacaaaagaagatgttttacataaataagcttacacaaaaaaacttgaaggatgtgtatctagtataaggttattaaagagatcccttaaataaagaggatctctttggtgtaggtttttgtaatagtaattatattaaattcattacaacgtggtgtttcatacttattaaaaaaagaaatgtgtacagttagtataagaaaagggatctaacaaaaaccattaatttatattttaaccataatatgttatagtattttaaaaatggtggtgtaataatgaacgaagaaaaagaaacacccgaaagaaaaagagagagattaaaatacgaagagttaaaaagaaaccccgcagggaatatgaatgatgcatttaatagaaatgaagctggaaacctatctggtttagcaggcagcttaggatggaaggggctaggtatacttattactgtactgattataggctttatcgttgtgtccctatttttaaaataatatgaggtttataaattaagagtactggaggagccattttgaaaaattatgcagtgtttattggtagttttatagtgttactgtttgcttttcaaattgtttctgggctatttcttacacttacatatgtacctgagacttcacagcatttgagtagctcaacgatcagtattttttcttttaattatccatttttaagttctattatagcagcgactttttcatttattatttcaaagaaagtatgtaaagttaaaaagagcacctataaatgattaggtgctttttgtgctgagaacattcattatggtttttaacaactgtaggttttcctttttatggtattatatataaatacatatttaatactgccgaaagagggagatacttaatgttgcaatcactgatttttgatatggacggaacgctgtttcaaacagataagattttagaattatcgcttgatgatacctttaaccatttgcgcacaatcaatcaatgggacgctagtactcctattgataagtatcgtgagattatgggtgtacctttaccaaaagtatgggaagctttattacctattcattcagatgaaatgagaaagtatacggatgactattttttgaaaagcttagtggagaatataagaaaagggaaaggtgctttatatcccaatgcaaaagaggtctttagctatttaaaagaaaataattgttccatttacatagcaagtaacggtttaaaagaatatttagaagcaattgtagaccattacgatttgaataattgggtgacagaaacatttagtattcaacaaatccaaaccctcgataaaggtgatttagtcaaaacaattataaaaaaatatgatatcaaacatgctgcagtagtaggagaccgcctatctgatatcaatgctgcaagagataatggtttaatggcagtggggtgtaattttgattttgctcaagaagctgagcttgcgcaggctgatgtggtaatagatgatttgaaggagttaaaaaggattgtatctaacataaataatagcttgtcagtctaatgggcttttatgcattataaaaaaaggattaatctcatttgtcatcacaaatatattcatagtagcattagagctaaaaagctggggctaggttgaaagataaaactttttcattatgagaaaggcggggatgaaatggcaataggaatcgcattaactgttttagtattaggtcttatgtttgcgagtggactaagccaaggaaagttagctaaaagaaaatatatagtatggggaacgactattatattaataataactccattcttttcatgggttgtttctattctgtttggtattaatcaaggagatggttttgcagcagttggtttaatgatgttattattgccgcttttctttttaatcggagtcgttactcttctgataggtatttttaagaaggacaatatgaataaatctatttagaaagcaaagaaagctctaagatttattcatggggctttctttactttttattatctcacttaacgataggatgattatagatataattgatcctataaaaatagcaaaattaactactccaattcccataccagttaatcctccgtaaaaatagcttatgacaacaacacttagactaactattcctgcaattaaaggtattgtatattttaaagaggatgttgttctgcccagtttgtatgaaagtaaaagtaagcaagcaactgtagttataacaatcaagtacattatagccatttttaacctccttgagctgtatgacataaatattaccataaatttacacgtcgataaatggttttttgaatctagaaacaacgattggaaataaatcatagcctgtctatctcatagattttaaaagcgagtttataccaacccaacatatgtatgtgtaatttaccaaagaagtttgttgaaaaagaaattttgtaattagtatctattaaagaaggaagcgaatatgcaagataaaacgatgataacaaaagttatggcttacataactagattcaatgagccctatacagagttactagtttgcgaacacaaagattatccagaagcaggagttcaagttccagccggtactgtagaagaaggagaaacaattgaagaagctttatatagagaggtcaaagaagagtctgggttaatggattttttatcggtgaacaaaataaaaacatacgtttatcatcatgaaagtaaaagtcagtatcatgaacgacatgtttttcatttagaagttcaagaagaaacggcagaaaggtgggaatataaggtgaattctgaaggggaagatgcaggattaatctttttctattattgggttcctgttggagctgttcctaaactagctgcaaatcaagatgactgcattaatcagttattcgtatagttttgaatttactcataaaagaaacatgcagttaaacaaaaaataaaaccgattttcacattatattaaaccgtccataaggagaataggaaacatgcttaatcaattaaagctgtgggctaaaaagttaaaaaagcagctatttatcttatacttagcttataaagatgaacgagtatcttggtataccaaattatttactgcttgtgttgttgcatatgccttcagtccaatcgacttaattcctgattttataccggttttaggctatattgacgatataatcattgttcctttaggaattatgattgctttgaagatgctgcctaaaaatgtaatagaggactgcacactaaaagcagaagagctcattcacaatgaaaaacctaaaaactgggttgcaggttcaattattatcatagtatggctacttatttttatgtggagttgttttattgtttttaagtttttaaactgaatgtactcttataaagaaaaaaagatatatataaggaagctaaacaatctctagagagtttattgagtagtaggtcaaatgcttggaatggggcttgtagtaaatgattttatcggaagaatcaactggagaaatatacttgcatacaatcctgtagaatactttgcattaatcctagcagctagcggggtcatcatctctctgatactaggtatacaaagtttgtaccgatggataattgaccaaagaaatcgaaaaaaatgggtgaaacagactgtgttatcttcaacaaaggagtgagagcagatccttatttcctccatatgcatcttaaagcagaaacaaaggttgtatcttagcccatagttggtaaccacaggtatcaattatgggctaatttatctctatgccttttgaagaaatgttcaggttaatggttatatttttatataaattatattgatttacaattagaaataaaggttgaaattaaactaataatccatttatttagtacgtttttttattatccattttttagagatgtagtgtaagagaaagcctctgtactgatttataatatagtaactaacaatatagagtatacttccaaacaaaaagctattaagaaacattcccgttaaaaaattctttcctactttcgctcctagttctagtcgattatccaaatttccatctgcactttgaagtaaagtttgatcaaaatcaagtggaaatatatatcctccaactactgtattcaaataaaacatcaacggaaaagcccacataaaaaacattccaccaacgagtcctgctatgctgtttcctttacataacttagctaaacctacggatattataaggccaaatccaaaggtaggaacaaagttcacaacagaacctagactaaaacctagcgcaactttatgtgaatgatcttttaatcgtaatagtttaataagtaagtatttaaaccggcgcttcaaaaccactattttgttcacattattcctcctatctctttacgcttgtatcctattttttctttttatggttacaaccataaaaaggtgctttattgtatgaaagatttagcggtatatacgtaaaaagaagagtaactttaaccattataagtatatttatactttatatgacaaaataaataattacctcctaataaatcaagtgtttttttaattgtcacaaaaaattcacaaataggttgtttcttttctatttctccctgctaaaattttatagtcaagaacaagaaaaatataacatcgggggatatacttagtgaaaaagataatttcttcattagctttatgctcatcattgattgttttgccaacaatcagccatgcagctttaggagacaagctattaaaagaaggtatgacagatccagacgtaaaagaattacaggatgttttaagacagaagggcatattttcagctacttcgactggctattttggttcaattacaaaagattcagttctaagctttcagcgttctcatagtttaaccgctgatggaattgtaggatctaatacatatcaagcgctaataggtaattcaacaagtgcggttacgagcagtacgcttctaaaatatggaatgactagcaatgaagttgaaaaagtacagcaattgttaaaggaaaaaggttactttaatgccacaccaacaggctattttggtacagttactcaaactgcggttatgaatttccaacgggatcatggcttagccgtggatggaatagtaggtccagctactttgaatgccttaaataacacatctagcagctccactggttcttcaactgtcaatagttcaacgcaagcgacagctagtgatattgttgcttattccaaaaaattcataggcgtaccatatgtgtggggaggaacgtctccgagtggtttcgattgcagcggtttcatttattacgtgtttaaaaatggaggtggagtaactgtaccgcgaacagtagctaccttgtatcagtcaggaaaaagtacatctactccaaatgtaggagatattgtgttctttgatactactggaggtccttcacatgctggaatttatattggaaacgggcagtttattcatgctggcagttcaacgggtgtaactattgcatcgttaagcaattcttactgggcacctcgttatttaggaagtaaatctatcctctaatagattactagtaaaaaaatatagcaattgaaactaagcagctttattcttatttgtgtaaataaagtgaaaagtcctgatatatagtcaggactttttgttatagcagcgaacaatggtcttaatataaatgatgtaactaactctctttacactaaaaaactgaccattatggtcagttttttaaggttaataaataagttattttgctcacttctcatatcgtttgtaattttatcattaaaaaatgaaaaataagtaaaaaaacaatattaatacaaataagtgaaaaaatatttaagtttgtataaaattcatgtgattcacaaaaatattgagaaagaacgttcgttgaaatttttaatgttaacttttatataaaagctgtgattgcttacagaatgcaaagttcttttgaaagcacctttttatttttatgaatattgagctttatgatacgatatgaagtgaactttttaaatgagggtctatatgcaaaaaattaaaggtaaaagaataaaaatcagtatatttatgctgggattagggattgttttttttctgtttgccgggaaagagcttgtggtaaacgaaaagccggtaaaatctgacgtgattattgtgttaagcggtgataatgatcgactggagaaaggaattgaattatataaaaaaggctatgcctctcatttaatcctttcgaatggtcaagagaataatttttatcatcaagccaaggaatcaggggtacctgagaattcaattatattagaaaatcacgctacaagtactacggaaaatgctaaattcacaaaaaggctaatgatgaactatcattttcaatccgctatcgttgtttcttccaactatcatatgaaaagggtagaaaaaaactttaataaagaatttaaggatacccaaatacaattaacctattgttctagtggaagtcgctattataatccacagagatggtgggaaactgctttaaatagaaaagttacctacacagaatacgtcaagcttattggcaattattttggttttagcggaaagaaatctaaagaattattaagagaatttatctaacaaaatcgtataaaaagtccagaggggatgtctctatggactttttgctatttaaaattacgagtagttgaacgtaatcttgtaagctcatatgaaacggaatgataatggattacttgtttaacataaaggaaagcacggtgccccatataaagattactaaatagaataatctttgcagcagaccggtaggcataggaacaaaaaatacaaacataatgagtatgaggatgaatagtaaggagactaaacagccataagtccaatacttgccgctggttaaagaagatgcatatatccaaaaaccagctaaaacagtgatcatgccaagttgagcgaatattgaatgccaaaataaatttatatcagccggtataaagcctgaaacaatgttacccaaagctaatataagaataaaagctgttgctagttgggttatttttgttttctttaggttttgtgaaatgtacagaacaccaattgaaagtgttaatccgtttataataaacaatacattcatccagaaattgtgaggagagcaaatttcatgaggtgcaattgaataggtgtaggttccacaagaagttacgccaagatcactcattgcgtgatgtaaaaaactgtaggaagcagttgaagtcaaaataaaaaaaggttcaactaaaaaatacaagcaagtagcaaaccagcttaaaatgccaagctttttcgatatatacagaatcatcacctcttaaaaagtattatatacgaattgtatatccaaataatgttaaacagaatggtcttgaagcctatttttaagtagggcttgaggttgatgcgaggaaggaggacaaagtgtttaaacttgaaggtgcttaggaaaaggcctctttactaatgttttgtagcggtaaagaggttcaaaagctgcttaattagaaatgaataacggctgattatgcacccccatacgtaaagttaatgtattccaaacgcggtgacattcaagacattttctctagaattttataatctgatgttttttgaatatctacatcatattcatgtgcaaatgtttctaattccttaaaaacatttggtggattaaataatgctattcgcatattccacccgttttctacttttactactgctaattttgttttccaacttaaccgtttaaatacaatttttttaatgttccttggtttaacagtttttgcatatactttaaaccgtaatatatatgttctataggttaaagtatctttgtctatctgaaattcatatctgaggaaaagggaaagaaacgaacaaaggatagcaaaaagaagtaaaaaatcaagtgctttatattgaactgcttgaatgtataacaaagcatttaaaggtaatagagtgaaaataatagttttttgagcggtagctttaaataacatagaatctcctttctttagtaaataagccaactggttttttctatgatattatttaagtgttaatttagattagatttatattgggaggtcttttacatgtataacaccatttcagattttatcaaagaatggaacagcgaagccatgctaactcaaaaagttttggatagcttaacagatgattcattgaaacaacaagtttaccctgaaggacgtacgttaggaagaattgcttggcattttacaacaaatattccagattatctaactgaattcggactgagcatagacagaatagaaagtacagcaagcgttccatcttcagcacaggaaatcgctataacctttaaaaatgtaagttctcacgctgctaaaatcattgaacagcaatggacagatgaatctttagaactcactcaagaagcgttcggaagaacccaatcaaatgccacaatcttaatgggactaatcaagcatattgttcatcaccgaggtcaaattaccattctgatgcgtcaagcaggactaaaaccccctggagtttatggacctccaaaagaagattgggttcatttaggtgtggaaaacccaccgctttaataatatcaggtaaataaaaaagaggctgttcatagaaaatactataaaatttttttctaggcagcctttacgtaaaacctaattaatcagttagtacttactctgaaaaagcttttgagtactgcacaacaccttgcatattttttgataatccctctgttaactctaaggtcataaagaattcttcaggcacgtcaaaatgttctttcttatcgctgtattcttcatttaaaaaagcgcttttcacaacttcttcagttttattatattcttcagtgagttcttgtttaattaagatatccataattagtatgtgtatattttatagtgttatattttatgagtccacccttaatacataatattttatgagtccacccttaatacataatatttgtaaatttttatggtaaaatatactatatatgttaaattagagtgtgtgaataaggggtaatatctgatgttgaacgtattatttatatgtttagtaagctgcttcattatttatattgggaaacgtgtatggaaaaaaggtaatactagtttcattgctgggtatggaaagatatttacacctaaggatgaaaaacagctcgctaaaggaattggccttattattatgttatttggctttgaatctataatattccccattctctctttgttttttgaagggattggattttattatggattgctggttgtattaaacttcttcgctatatttggacttatgataaaggatcaggtgcagggaaaagtctaaggaggagaaaaagatcaataaaaatattcgacttatgattggtttactcagcactattatcctgtgtttctatggagtaagaggtttattcatacatgaaacaataccgttttcttcttacctctttgcggtaggtggagctatctccaccattactcttatctgggaattaaaaaagaaagatactgcttaaaagtggaaggagtgatgatgtgaaaagacgatggatttcctggtggatagctaatataatttggatcatacttttcgtcgtaggcacagctgttgtctggacaagagaagtggatggagcgggtgttacccaaacaccagagctaaaattgttcgcatttatagtgttgctaattgtatttattttccctttgattattcaagttatatggctaattattaattttaaaactagtaagcatgtactatagaaactaggaatgatgttatggaatagagagggatgatgtgtatgtacagcaaaaagtgctctaaatgtgattcaactctaatcaaagctcgtattcaatcatcacctggtacagtaggtgtaaataaaacaccgagcagcatattaaacaacaatcacaattacagtgagttaataccttatgtttgttcaagctgcggttatgtggattttttatgtggaggagcctggaaagtttgtttaatagaacttttaggattgttcgttttcgaatacactatgatacgttactgaacttggtatatcctctaatgtctattttaattaaagggcaaggaaaatggtttgcggaggctgcttattatgaagagaacacttagttttctgtcagtagtttatttaaccgttctaactgcatgtaaccaagaaagtacaggaataaatatagagagctctgctatcattgtgatagttggaaataaggaatataacggaacagaagataaattagatcaaacacaagaaataggagaccaaataggaacaatagaaaagaaaactaaagcaactaaaatgccggcaggtaataatcaatcaaactattttacagttggttcagaaatctattcagtaaaaggaacagaggattatattatagttaaagataaagatcataaaagtcagttaatgaaaaaggtagcccaaaaaaggtgagtattatttaagttgactactttatcttttagaaaatacgttctatgtgagcgtattacatatatcaaaacctaattatagtaaaacaaaaaaaatttaagaggtcgaaagtgaataaaaaaattcgatggagcttagctagttgtataacaattataggggcgttaagtatatattttttgttcttttcttacgataagttttatgtaacaaaagacgagaatatgtttaacacaaagcttttaagtgatacatatggaaattatgagtgcgtggagatggctgatcaaacaaagtatgactctaagaaatattttagagccttttgtaaaacacaaaatggggatcttgtttatgctattaaaggtgatcctaagcataaacaagtgctgctagttgaaaacacagagatgcctatgtggtttttatattctagtcaataaaggggctaaagtgtctacaaaatccattatgttaattaaagaggatgtattatttttctcttgaaatatagttggaataaagaaggcgctgcgttatgaaaaagttctctcttagtttatttattgcttttctagtatttataatttcagcttgttcaaatacagagtatgtaaacaatgtcgagcacttaaaattacaaaaaacagaggtaaggctaacagatgataaaaaaatcgttggggagatgatagtacctgataaaaagaataaaagtaaacgtatcgttccaaccgagttatactatacattcacgatggaaaacacgtccaataatattatggctctctctgatctcgataaaacaaaacttcgcatagaaccagataaggagttagtatcagctgtaaaagaagcaattggttcaaatatttataatatggataacaataagttaggtattggtatgagtataggagaaattccatctaaaggaacaagtaaatttactcttagttataccttaggagcaaaacaaaaaataatgaattacctcttttgccagctgaagaaaaactaaaaaagctacaggctaatgcattaaaaggcacactcattatctctcaagatgacaaggacattgcggagttcaggttagattcaagacaataaacatgatttcaagtgtaaataagcgaataatccacttactctggcaacatacggagttagtggattattcgcttatatttaagcgcttttatgtgacaactttttttacgtgtgagattagttttaatcatttagtcacgataagcgctcgaataatttcattccaatagtatttgaagtttttttcgctggtatcttttttcgctagactcattgattccttcgtattctctttttttatagacattatgatttccccttatctctttatatttagtatgttgtggtttgatttaccatattttataatgaaattagcaatcattacagatgaacattacgattgaatcaatcgaaatatccgattatatagaggtgaggaaaatcgaaataaaacaactaattacatttaaaacagctgcagaaaatttaaattttacctatacagctaaagttttaaattttgcttaatcaagcgttaccgctcaaataaaagctcttgaaaatgaacttgaaacgcctttgtttgaacgtttagggaagcgcttagttttaacagaggcgggtagagaatttaaaagatacgctgataaaatgattcaattgactaaggaagcaaaaaacgctgtaagcggagtggaggagcctgcgggtacacttattattggatcttctgaaagccagtgcacgtacaggttacctccaatattaaaagagtttaaggatcaatttccaaaggttaaaatgatttttaagcccatttactctcacacacaaacaagagcgcagctactagacggtactcttgatatcgcctttacaatggagcctattcagcatcatgatgcaaatttacatacacaatgtcttgttgcagaagacttaaaaattattgcttctcctcagcatcctttagctgataaaacggatatctacttagaagagcttgaaaatgagactcttttatatactgagtcgggttgttcatatcgggtagtattggaaaacttgtttcgcgaggcaggtatttgtacatcaactaaatttgaatttgcaagcgtggaagctattaagcaatgtgtcatgctggatttaggtattgccatattgcccgaagtagtagtaaaaggagagcttgagaaaggcatattaaaagaattggcttgtactaaagttgatacgcccctttatacacaaatggtttggcataaagataaatttatgtctcttcctttacaatcttttattcaattggcttgcagtacttttggtttaaattatataggtatccaaagtgaaaaactctaggtacgttaattatgctgactaaagaattacacaggatatataaaataatctaatgtctttcccaataagataaaaggtgaaggaaatcttcattccttcactaatatatagatgaaccttaataaactagattttaattggtgaaatctgagttaggagttgatctgatttggaaatgagagtaaatcaaatcgaactaaatggtttaacatttcaatatcgagaggcgggtgaagcttcggcacccgccattattgcacttcacgctttgggaatgagtgcagagtcttgggatgaagtagcagctgtattagggaaggaatatcggtttctagctttagatcagcgagggcacggtggaagtgagagaaccggcacctatacgtttgaacttatgtgcgatgacttgcttcagtttgtaaatgcgatgaatttgaagagctttacgttgattgggcattctatgggtggtacggtgtcctatcttttttctgaaacatttccagaaagggtagatcaattgattgttgaagacactcctccaccttttacaggagaaaagttcgaaattcctgccaaagcgcctggtcctttaccgtttgactgggaggttgtaccttcaattcttcaacagttaaataaccccaatcctaaatggtgggaaagtcttacagagataattgcacctactctcgtcataggaggaggatccagccatattcctcaagataaattgcaagaagtttctaagcgcattccaaattgtaaattagtaacgatagaaggggctggacatgaggtgcatgcaggaaacttatccgcttttttaactgctgtgaaaagcttccttgattcgtgactttctggagcttttatttaatttgaaagtttggttaagtaaatagaaaacaaataaagagccttaaataaggctctttatttgttcttaattcttttacgataggaacattcttaaaaaattgttctcgaatagttgccgatttaactgctttattaatcttctctttattattatctataaattgctgtgcgttttctttatcaaataactcattgctacttggtaaagtttgaatgtttttggaaatgaattgtttcatttcttgtctagatactgagaatttctgatcatctattttaaaactgtacccttcagcattaggtattagtatcgttaaataaatagcattataaagaaagtttttctctagtgtatccttaccgtcgagccaatattttaatatttcatcttctgataaagagtcctctttagtaccatacattattttnnnnnnnnnnnnnnnnnnnnnnnnnnnnnnnnnnnnnnnnnnnnnnnnnnnnnnnnnnnnnnnnnnnnnnnnnnnnnnnnnnnnnnnnnnnnnnnnnnnnatcctctttagtaccatacattatttttggtgttttattatgtaaattaatttctttaaacgtttctcctccaggcaatgctcttacaatagctactacgttagaattatctccaacataagttccactgtggtctttaagatcttttacatcaacagtgttaatgcttgtgacttcttcttttgaagaacagccggttatacctacaagtattaataagatcaaacaaaaaagcaccttaaaatatttcataaaaacctccattttcttactttaatacccttatgtggatatttaacgaattatcagcgtatcgtaaatatgatgttttgaaaagatgtaggtacttttgtacaaaatactctttgctataggaaaagttttgtctactgtaagtagaaggaaggaactttgaaacatgaaaagaccccaaagctttcttaaaaaagcgctttgaagtctgcatatctcatgttttgattttaggagctaatctctacaattgatttgatgatttgttcccagtcttcactatggacttcatgtcctgtacgctcaagagctattagattagcatgagcaatagcttttgcaagagcaagtccatgttcgtatgggagtgccggatcttctgttccatgaataatcagtgtaggtatgttaatttcactcagcctgtcataatattgtccgcctccttgaagcaaagcatgattaaatctactcggcagctgtttagcacgggcagcttctctttctgctagcttatacattcttttctcttcataaggttttgttccacttaaaattttccatccacctgcaaggtagggaacggtttcctcttgatttgaccagtctatggaagtgctcttcgtgtggtaatcaagtatctgctgatccattgggggcaatttttccgcctccgttccaaatacgcttgatgcaattaaagtaagggagtctatgcgatccggatatctaagagcaaggatttgtcctatcatcccgcccaaagacattcccacaatatgagctttgtctatagagtaagcatctaaaacaccaattgcatcgtcagccatatccgttattgtatagttagacgtaccgggtggataagtggtagatcgccctaaatcacgatggtcgtaacgaataacaaatctctcatgttcagcgaggcgaagacagaagtcttcatcccaccaatctaacgaagacattgctcccattattaaaagtacagcaggattcttggggtttccaaaactttctgtacaaatctcaacgttatcaatttttattatctcttcattcattcgtgtacctccttttaagtgttagagaaatgaaaagcagtcctttattcagttctctaacatagggatatttccttttagaattttatttaggaaatcggttattctacctatctctttacctttttactaaaaagtaaaatatagcgttcttgaaaatgtaactaaggaaagagcctaaacttgttggagactagggggattcagcttttgctgtctgaaacatgttgataaggcaggaaagttgaatgcatgtatggaaaaatacttatgtgaggtgaaataagaatgaatgattactatggagaaaataccttttaaactttaattatatttttttatttattacaacttgatagattaatatacatatacgggattgctgaattcgtgtgctattgataagcatatgaattcaacgttctcatgaggagatgctttatgaagcggttaataaataaaattgcgattgttactggtgctagtcgggcaaaaggtattggtactgaaatatgcagggaattagctagagaaggcgcagatatttttttcactcattggtcaaagtatgatcgtttaatggattattttaatgaggatgattttaaatggtcgaaacatcttatggaagagattcgcagtctgggagtgcgatgtgaatcaatggaattggatttatcgcaacccgatgcaccaagaaagttgcttgatgaagttcaaaacaaactaggttctccatcaatccttgtaaataatgcaacacattccgtggacgtagattttcgttctatagatgctgatatgcttgatgctcattataacgtgaatattagagggacatgtcttttgactgttgagtttgcacgtctaatcgaaggcaagcatggcggtcgaattattaatatggtttcaggtcaagataagtcacctgagcctgggaatttggcttatgttgcaacaaaaggggctgtgtctacgtttactaaatcagttgctattgaattagcacctcttaaaattaccgttaatgctgtagatcctggaccaactaacactggctggatgagcagtgagttaaaggaagagctactgtcaaagttcccaatgggtcgacttggtgagccccgggatgccgcaaaattagttatctttttagcaagtgaagaatcagaatggattaccggacaaattattcactcagatggaggcttttggtgatttaacatagtagcggtcttccactttttagcggatttttgcatgaaacaagcagttaaaaggatcttcgaatgaagattcttttttataatgtaacgtaatatgacgataaccgattttctccactttattagtcagtcccaaaggattgttgatgggctccaaaagaaaaagtacgggcttttctaaatcagtagtaagatgagatatttcatttatgacgaatgctttatcattttcacttattgacgacaaataggatatattcagggggaaggtttatatgtcaagctttgaggacgaagaagtgctaacaggagggaatgtctctaacgtttatcgctcgggagatactgtacgacgagaattaaaattagatagtcataaatttcataagctattaaagcatttagagaacaaaggttttagttatgcaccaaaatttttaggcattgacgaaaaaggaagagaggtcttatcatttattgaaggtgaagctggtaattatcccctgaagaaatatatgtggtctgatgatgttttaatagaaatagggaaaatgctccgtctttatcatgattcagtgagtgatttttcatttgatgacagctggaaatcaatagataacactcctaaaccatttgagatactatgtcataatgattttgccatatacaacatcattttcaagcacgaaagaccagtaggcatcattgattttgatgttgctgggcccggtccaagaatttgggacattgcttatactctttatacgtgcgtccctttaagtagattttatctttctgaaacaggtgagaagatttattataattcattgcagcatgctcaacatataaaccgaagagtgaaattattttttgaatcatacggcgaagaattacaagaaggttatttggaagtggtattgctgcgattagaggggttatgtaaaacaattacaagaaaagccagtgaaggcgacagtgcgttccaaaaaatgatacaccaagggcatcttgaacattatcaaaatgatattaaatttattcgtgaacataggagagaatgggtttaaggataagttttaattaaagaaacaacacacttttattaaaaagcgtgtctttaacaccctttatgtaaatgatggttgttattctttgtagaggagcacttgttatgcgaattattaatattagagaacaggtagagtacaaagataaagctattgaatatattcagagtaagtgggcgagtaaagagaatttaagactttatgaagactgtattatacatagcttaaagacaaatagttgtcttccagtttggtacttgttagaagataaaggagaaattatcggctgtgcagggcttatcaccaacgattttataagtcgaatggatttatggccctgggtgtgtgctctttatattgaagaaagttatcgaggtaaatccttaggtgagcaacttcttttaaagttgaaagaaaatacgaaagatgccggatttgataatctttatttatgcactaaccacgttggatactatgaaaagtatgactttatatatataggtgatggttatcatccatgggggagtagttcaagaatctatagggctaatttaattaaactgtgattgtatttaatagattaactattaatttttatttgaaatgtttttaactgtttcaatcagtgaatagcgggtataggttgattatacaagcgtagtgccccccaggaacatgcatgtatatttctttttcttacttaccctgtttgaaccctcctattgtggcgggttctttttttgtgtttaaaagatacaactttttagactatatacaccggacaccttaatcatatcttatactcaatgaatcaatgcaacaacagtgttacgagatgaaagaggttcagtgtagttttgaattgcggtagcaaaaacgaccgttacgtactaaaggctagctttttatatgtgctctagaaagaagcattatgttgactaggagtgaatgtaagagagattgtagaaatactatggacagatatagccaaatttttaattggtaaaatattttttgtgattttacgcgctttgcttatgccaattttcatttttttcatagtatgtactataaatgtatagggaggtgaagttatgccaggacgtcgtagtggagatcgtcgtacatctcaatctcgctctatagtagataattttcgaagaggagataaaattcaagttttttctgctggaagacagcttgatggcaatggtacgtttattcgagcagaaggcggatttttagtatgggaagataattcaggtaatagaaatacgactagtttagaaagtatcagcgttcgcagattaagaaaacgtagttgctaatcttttggacaggctctgattttatataaataaaaaaacaccttcaagctgaaaaccgggtatggggtaccgagcaatcacttggaggtgttttttctcatgaaaaactggtgatttcgttttgaatgtattcattagttagcatttttagagattaatttagttaaccactatagattaatacctttcataagacggaaggtttcaagaagtaaaacgtttaaccctagccatacgcctccaaatacatatcctgctgcaatatcgctgggatattgtatgctgagatacaaacgactaatcgcaataagcaacaaaataagaatggctgctattggtgctaatgtaggaacccataatcttttagagtgtcgaaccagcataaacacagcaaacccataaataacaaaagccattaaagactgttcgcttggaaaggtgtatgaaaggtgttctattaacgactttctaataggggagaaatgatggaaaattcgtctcagactttcttcgtacagctctccgccgcctgcaacagctaccagagataataattcaatttttttatctctgcctttccataaaatccatacaagtgtaaagaaaatcaatgctaccagaacttgcctggatcccagcgtgaaaaatacccgcattggtacattccaatctttattaaaaagggctgttattaatagactcgttattttgttaaaatctccaaactcgtttgcgataaagtcttgcgtcattccaatcataagcagaataaaccctaatgttactaatgctgtaaatataaaaacaagccctgcccgtttccgcgtatgaaacacatttactatccacttgagacaattaattgctatctttttaatcgttactttgaactttttataaatgtaaatagcaacgaacaaacttacagctacaatcatcccaatgataaagtacttcttgatagaatgatgaaactgttcccactgaggtcctaataactttcctagagtaataaatgtggtgacccaaagaaatgatccgctataggcgtacagtgcatacgtacgaaaaggaagccgagtaattcctgaaaaatatcctgtaatatgtctaataactgggaggaaataagcaataatcaacagtttgtttccatgtacactaaaccattttgacattctttcaattcgctctggccccatatgaagagtttttccgtatttatcaaaaaaaggagtccctaacttataaccaactccgtaggctatggtcattccaaccatactgcccataccggcaaccaagatacttcccacccagctcaaatgtccttgaaaggcaagaaccccagcgtagcccatgagcagctcccctggaagaggaagagcaagaagttccagcatcaatgctagaaacagcacgatatatccgtattgatttatataagatgtgataaaatccatggtttgtccttctttcatagtatgtatttacctaaagcacagttagtaacttgaattttattgaaaataggagaagtgaaaagagtaatttcacctttgtttttttaatgtagcactatttataaaaaaaactggatttttcattgatttttaatgttatttttagcctatttttaattacaaaacgtagactgaaaatgtgctatttgaaagctcagcttaagactgtatgtttttctaataaatagtgtaagaaattcctaaacaatctatgtaacgaaaaagaagaaaagatacaccacacaaattgattaaaaaggctaaatacccggtattaattttttatcatgtttactcttttattagtagagtaattttttactcgtataaacaagagaacaaaaaggtgcgtgaaacagcccaggctttaccacattgcaaaagcataaaactacaaggagggaaagtcatgaataatcgcgagaaagataaatacctcattctttccgctacatttggagagggacataaacaagtggcaaatgcgataagcgaggcagtaaatgagatggttgctgatgctgagcctattaccatggatatcatggagtggattcatcccaacctctatccaatcagccactatatttataaaaaaagcattaagaagtttcctcaagtgtatagctttttgtataaaaaaactcgtgtaaaaaattcgttttccgttaagctaaattcgatctttttatcgggcatgcaagctgtgcttaaaatcatacaggaaataaaaccgaaagtagtggttagtacctatccatttgccgccgggattatatcaagattaaaagagcaagggttaattgatattccagcggtaaccatcatcacagattatacggatcattcttattggattcatccctctacagatcaatatgtggtaggatctgctcgattgcgtgatcaattaattgtgttaggggtagaggcaaacaaaattaaaaacactggaatacctgtacggaaaagatttatggatgttcttccaaaagaccttctcttagataaatatatgatcaatccaaatatgttcaccctgctcatcatgggagggggagatggattttttggaaaagggatttcaacctttaaggcattagaatccatttccacaccgattcaactttttatagtatgtggtaaaaataagaaattaaaaacacaattagaatgggaattaaaaggctcgaagcatgacgtgagaatttttggatactgtgacaaggttgaagaattaatggctatttcagatttaatgatcagcaagccggggggagtaacaacctctgaggcaatggcgatggatttaccaatactgctttatcattcgttaccaggacaagaagaagacaatgcagagtatttatgtcgttcgggattcgcactgtctgcaaagtcagaaaaagagttaattgcgcaaattgaaaatcttgtccgcgattcagcacctttaagatggatgaaacaaagaatgaaaaaatatcaaaccaaaacatcatccatagacgctctccatgtcattatcgaagcagcaagacgcggtccattacgtaacgtaacagatagtagaacgatacaaaagcaaaaggagatagaggtgagtatataatatggagttcatgatttttgctattattttttttattttattatacaccgttattccgtatttcttatcacgtggtctaggagtgaacgtagttaaaagaggaagggatttatctaaaattgcttttacgtttgatgatggtccgaaccctatttatacgccgatacttcttgatttattgaagaaaaatgaggtgaaggcaaccttttttgtggtcggtactaaagcaaaaaagtaccctgaactgattcagcgcatgcataatgaagggcacttaatcggaattcataactacgtacatcactccaactggtttatgtcgccttggaaagttagaaatggacttaataatacagccaaggtgattaaatctatcactggagtcacacctatttattatcgcccgccttggggaatgctcaaccttttcgattttatgagaagaggtaaatataagattattctatggtcaatcatggcggaagattggcgaacctctggcggaagcgaaaagattagacaacgcctagccaacataaaaggcggggatgtcattttgctgcacgactgcggaaatacgctcggggcagaatctgaagctccaagaaacacaattaatgcgttaaaagatgtattaaaaacagtgcaaacaaaaggattcacttgtgtccgtgttgatgaattggtagaaaagctataggtagtaagaggattatctttattaaagcttgcgaatgaaattttaattcttgttattaccgtaactaaatatcttgtctgctataaaaaagaacctctattttaaagaggttcttttttatggtcagtaaaaatatatggtaatataatcnnnnnnnnnnnnnnnnnnnnnnnnnnnnnnnnnnnnnnnnnnnnnnnnnnnnnnnnnnnnnnnnnnnnnnnnnnnnnnnnnnnnnnnnnnnnnnnnnnnncttttggagtttcctttgggattgctatctttgagtattatacacataaaaaaggcaaggtagcataaggtgcagtgtttttcacccaatacataaaagattttattagaaacttaaatgtcatagtattaaattataaaaattttgaggtttgagatgggaaattcgttgaattacatttatttttttattgccattttagttagcttgtacttttttatcaccaataaacactccagaaagccactattcatgttgttactatcgatgcttttattttatagcagcgcgtatttcttttactataagacttatccaattaacttactcagtacattatccatacttgtgctttggtggatcatccttttattgctaagagagatttactctagagaagaaaatattttctggaatctttgtttaatctatgtagcgctataccactatttgcattatgtttttgattcattggctcaaaagaactttttgtatggatttatcttttatttttatacaaatgtaggattacttctgcttggcttgtactatttcttaagagtctataaaaatagaaccgtgcattagaatgaaaaaagctctttggagatcaatgtccacaattcttgtggcgttaaatttttataacagattgctttggagaaaatcaattatttttcatcatttaataaatattattaaatcttatggacgccttgtatatttttatattatttaccgcactttaaaagaaaaaggtgaggctgatataatggctaaaataattccatccttatgcattttgctcggggcttatgttcttattgtattcatcgacgtttttcagggaaactatatgtttcaatcgttttataacctaaaacaatattttgtaattgcccgtggggaagattattttttggttattttatttgcttcaatattccttgctgttagcatttttcctgttttaaaaaaacaatagcctcccttctcatgaaagggtaggctttattttttgttttatatatgctgtaatcagcaataggatgggaattgctatatgaaaagggaggtgcaataaataaggaacaattttgagtccttcatttatatgagcttggtaactaggagcaatcatcagtgaggagaaaaaaataacaccgccaattaaataaatgtttgtaacagaaggtttcatccgaaacaaatcagccgcgccaatcactgcacaaaagaaatagatggttattttaacaaaacctaaaatgaccatgagaataagaataaaggtatccagtctttgaataaaactagctatgttaatgtaactcacagctgtaagagccgggaaagaggatcttaaaacagtctctggtccgagtacacacaaaagaataattgaattaatggttaaggcaattcctcctattataatggcggataaaccaattgttgcggcctgattttttttatttaaataaggaagaatcatagtaaaggtaatcaattccccgaaaggtacagtaatgccaagagggactaactcttttcctatgtttccccatccattcgctaatacgggttgaaggttctccaccttgatgtagcctcctactacatacaaaatatttaatataaaaagagtcagtaaaataacaacaaaacataagcatgtaactcgtgcgaatgcttctattcctaagtgagtactataaattaacacaaaggtcatgcatatacccagtgtaataatcgatgtaacatagtaagaagagctaattagtaattcttcaaaatcacgtagtactctggaagcaatataaacaaaatatataatataacaaaagctgatagcaccgcctacgtacgtatttaccccagattttaatgaggtagccagtcaaaggcatattagggtatctcttatataaggagatatagactaaatacagtaaacatccaaaaaaagtagccaaaagggggactatccatgcatcttgcctagcagcctttccgatatctaaaagcagcgtactgcctaatataaagataaacatcatacaaaataattgaaacccgtcgatttttattttagtcaatgctttttcagctcctcatctaatttacttcataaggatttgtccgcattccggtatttacaatactgacgttcacattcatcgataccttcgcacttgaaaatagattctcccaattctgtttatgctgacgccaataactagggttggttcgagacaagctatcaccaaagccaaatatatctgccttttctttttgtgcgatgcgaatagtttttgtgatttccttttgtaattccttttgtacttctttttccaattctttcaataccttagggttgtttaaatctttttggcatgatgtttccgtaatttctcccacgacgttcaaatctgtatgaatgaaaggttgtccacggcggattgctgtttttatttggccttttattccagtcgctgtaactgtgatattctcatttatattacaagggaaaacaagggctgtgcttttcacttcagacgtaacaagttgaacagatcgagcctcatcgccatctagccatcgaactaattttccttttctaaacatggctaatccttttacctgcatagcacttgggctggtattctctaaattgcctgcttcttctgccttctgagagggcttgttaatgctgattccaggaagagatagatcttttccctcactcaaaagcatagaaataacttcatatgcttgtacattactaactattccgtacattttttgattattctggctggtacttaggatacttttgactggagtaacctcaaaaggttcaatcacaccgagcaatttctcagcagtcccatcacgtgcaataaaaactggaatacttgtacgagcttgtttgcctcgatccaaagcatcaaataataagctaaggtcatttcttgctaatttttcacctataatgataagcgaaagatgtgaagtaatatgttctcttggaatgacgatggaggctttttttaatgcctctactagtgttttggcagttactgtgtagttaatgacaggaagaccctgtcctcctgacgaactgccctgtgataaaccacttggattaatgatctgataggttactttataaggttgttccaaattttcgttctcatcaattcccaatcctataataactcctatttggtttaattctcggtaattcgaacatcctgaaacgcataaacaaatggcagcgatccataaaagcgaaagataagttttcattttctatcctcattcatctttatacgacgtctatttattttgatgttttttcaacagagatggtaaagagaatcgaactaaagtatccttttgctctttaaaatcaaagggagcaaaaggtgaaaagtagggaataccaaaagatcttagactacttatatgaagccatatacataaggtcataagcaaaattccatataagccaataaatgctgaaattagaatcaagataaaccgaaaaccacgggccgcattgacaatgctagtagatggcagtgtaaaattgctgatggcagaaatagcaacaataattacaacagccgctgatacaaaacctgcttctacagctgcttgtcctaaaatcagtgctcctacaatggagactgctggtccgattgctctaggcattcggattccggcttctcgcaacatctcaaaagctagttccatcactatcatttctacaattgctggaaaaggaactctttctctttgcgccattaagctgaccattaatgtgtttggaataagtccctgatgatgcgtaatcaatgctaaatagatagcagatgcatacatagaaagaaaaaaagaaccaaatcttagtatccttaaaaaggaggaaatgtaataattctgataataatcttcgggagactgaaaaaattgagaaaaaatagcaggcgcaattaatacaaaaggtgttccttgtacaataatagcaattcgaccttctaataaatttcctacaacggcatcaggtcgttccgtatttaatagaagtggaaaaatagtggtcctatcatcccggataaattcctcaatatagttcgactcaaggaccccatctaccttaatctcttttaaacgttctttgatttcctctacaatacgttcatctgcattcccttggatatacatgattcctatatctgtttgggttacgcttccaattttcatgctgtctaagcgtaaattagaatcctgaattctagctcgtatcaaggaggtattagtccttaaattctctgtaaaactatctttgggtcctctaacaacagtttgactggttggttctgttactgcgcgggactgaagtttttttgtattgccaatgaaaattttagaacttccattcagtagtatgaccgtatcaccagttaaaactgccgacacaaattcatgccaattctcttttatagtcaattgagatacagtcaatatttgaggtatttgttcttctatctctttgacggttactacttgattactttctttaagccactgaataagaggcgtcatgatattctcatttataatgttttcatctgctaatccgtcaacgtgaataacggctgcttttaacgttttttgatacggagactcaaccattcgaaacgatatatcagaactatttcctaattcgtttaatagtctctctatatttttatttacatcatcatataagggagctgctgaacaatctggtgtcttttctctattagagcttttcagaagatatttttgtcgcacgttttaccaccttttatatgaatgaatatttgttatacaacgagtaacgttatcattcctataaaatgtaaaaaatatgcacatgaggaaaatacataaaataaaatgataggaaatgtatctaactttgttttctattttgtcgcattagttgaatgtcaaagtagagctgaggattctttagagtttttagatgaaaatcaaagcgggttagctagtattactttatatccagtgacagatcagaaggtattgttttaagagtgaagtaattggagagaaaagcacctcacacttctctgtatatctgatgtttttataaccgatatcgtacattgtcataattaaaaatgaagtgaatattcacattgattgattccaaaattcccaatgcaaaagaataaaaagccctctcttaagtttaattgcttagagattgggcttttgtataggaatatcttcagtattataaatgaatttctacgctacgtttctcttaaacaaatgggagttatcttttatgccttaacagtctgtttttttacaggaatgtagatatcaatctctttattttctgaaccataacatcttttatcatacagttcaaattccattgatccgtagtgctcataacccgattcagggaaccattctgtaaaaacataattccatgtggactgaatggaagaagtaaaagattcttcatttgattttggtgtagtaaatacggcatagtctagttcagggaaacttctgtaaactgttcctttaggcgctgaagtgccttcctttacttccatgccaattacataaacaaactcacccgtttcaggattaaaatcggtgcaaataccaagctccgtgttttcttttaagggattggggattttagagcctaatctattttgcatgtactgttgccaaaattcaggaatgtctttgttattctggccaccctcgttcttcgtttttagctcatatccaatgacataaaaagcagatttagtgactagttttggttccatcttatttcctcctgacaaaagtgtggtagttaggtaggcttttccccgcagcggtccagatattctccttgcgttacggtattgcttcggcgaaacatcataaaagtttttgaacgctctgttaaatgattcttgatagtggaaaccaacatcaagtgcgatatcaatgactttttcatctgtgaaaaataagcgttctgctgcgcgtgtaagtcttcgtttcctcacataatccatcaccgattctccaaccatggcttggaagacacggtgataatgaaaaggagaaaagcaagcaatttctgctaacttttctaaagtaatttgtgtctccaaattctcctcaatgtaatctagcgttctttgtatgcaagttacataattcatttacattcacctaccttacgttcactataacagcaaacaaatcgttgttcttaacattttttgctatattcaattagatgagggtagttttgcaatatacgcctctagatgtatagtcctaaggggattttaatgttaaaattttctatgtaaattaatgggattaatacattggtaaagggagcgttcgaattgaagaaactttattttagcttaatgattatttttttattaggtgcttgttcttatcaggaaagtacaaaagaagttagtgaagaaattgtattaccaacttctatatttagttcatcgaaaaataatgctgtaattgatgaaaaggaaatgaaagaaagtataaagacttacttaaatactaacgaggatttatccaatatcagtgatcaatttgaagaaatgatggattctgatcaacagctaactaaagctgaagcgaaaaaacttgaacaactaaacgatctggtcaaagaaaatgatcgtaacttttccacatatatctcgcacaatactctaccagaaggatataaaaaagagtcagagagaattagccgctttattatgggttccaatcaaattttggatgaactggatcaagccatcgatgacatggttgagcatataagcgaaggagatttttctgaaacagaaattgagtcacttatgaataaaaatgaaggtgtaaatggaagggaacagaaaaagatagagaattttctagatgacaaaaatattgatacaaaagcttttggacgaaagagttaaaacaatttaatagatttgctttggttagggggagtttactattggagtagttaagtctacaaataaacttgcattttctattatctatttagtcttcggtacagttttggggatagtagccaaatatttggatactattgcaggtgctgatggaagctggtggatgaatattctgccgtatttcggggatttgtgttcaaggacaggtatttgggtactcattgctacccttatagccgcgtatagtaaaaccaaaattagtgcggctcttaatacattcatgttctttataggaatgctaacaggctattatatatattccgcttttctatttggattttttccaactagttattttttactgtggggaagtatggcactagcgtctccgtttctggcagctattgtatggatggctaaaaataatttacgtctagcttggatattaccagcgttgcctatggggttattgctaagtctttctttagcggttggagtattttatatacatgtaaattatattgaaaagttcattatgtatgctgttttatgcggagtcttttacaaaaatccaaagcagctagcgacaacaatttctgtttcgtttatcatttcgtttattatcaaacaagtaagtccatttcacttttgatttagattaaggtttaaaaaaaatgaaagtttactatgtgaaaaggggatttcggtaactaactataaatacaattcaaaacggcttttacatatatattcttcaaaatacagtaattaggaaacttttatagaagtaattcgtataaaaggcaggaggtgatggatattaacacggaaaaacgtctggatgaaattgaaagaaaattagatgatttacataataagataagtaagcaagaaaatagagtaaagtataaacctatctttacaattgtactcattttatctgcaattctcatattttttgtcctgataggtgttgtaagcttttttacaggttaatttttttactaatctctcagaattatttctgggagacctttcattatttaaactaacgacaattcattttgtataaacttctatataatatacccgcttaaaataaaaggggataaaattatgatgggaaatgaaaagaaacgttccacatttagtgcgactttccaaatttacgaacagctattaaaaaagatcttacatatgttctttactagataatattctacgccatgttaactaaagatatatattatattctacgccatgttaactaaagatatatattttaataaaatataaagtagtaaaaatgacattatggtgtttacatggaggaagagcatgagaaagttttatattgctttatttagtcttttcttttttatttcattagtagttggatgtcaaagtaaagctgagaatcctttagagttttcaggtgaaacccaaagctggtcagctactattacgttatatcccgttgaaaatagtaaagaaacagctcaaatgaacttaaattatctaggtggtaaggtagaatccgtaggagattttgggattaatttagacacttcaaataatcaaaatgaaattgcagtaagagacgcaaagttaaataaagaagggaatttcaaagaaaaagtaaaggttgacgctagtaaagatgtaattaaacctgaatatatgactttaactgttaaatggaatgaaaagtcagaagatatgattttaaaagttaagtaattaggaagaaaagcaccttatactcatctatatcaaatattccctcagttctttatccttactatttgttaaaatataatattatatatcaggaattttatttttgcagtttagattaatatagtagcggttttttggaaaaatccttagctcacataatttctagttgattccttaaaaggtgaatgccccctcaagccttctgagtagggggcgctatacgaacatttttaaaatctaatagaagattattaatgctcactttcgtctatttcgtcttattttcacgtaagtagtcggtgatgtaccaatgacgttcccgcaggagtctaatgcttttacttgaaaatagggaccaactgcctgagcatggatatctgtttcaaatccagtacgagggctactaaatatcactactgacaatttaaaaggcgttggtcctgccagtaactgccaagcaaccgtttctgttgaaccattccatgatgcgtaagctgtagcttgaccgtcatgcaataagtctaccgttatgctaggcgggtaaagtggtagacctacccacttatttttaaacgctcgataagaaaggttctgatttggataccgcatatcatataacaaattaaatgaaggatttctttgtgtattaccagcattcttaaattctgaaaggtagggctcttgcccccacccaatgagttgatttccattggaaagcttttgcgcatttccttgacttggaacgtataaagctgggtcatgataatacgttcgatctacattggcgaccttgtgtttatagtctaagtgaagaattaaaccacgcgcctgtccctcaggaggagaggttgaagaggcacagcaggcgtcatcaaacaagcttatcctattttcggacctatagcgcgcatcatgctgccaagaaaatgcagcgttcggtccaagcttaaaatcactttgttttccaccaagttgccaaattacctttcccgtttttttatcaatgttataaatggcccacatattacgcatactcactagaagtgtattgtttggcccttcttcgactgaatttacgtggtagcaatcccatatattattagaacttgtcgcggatgaagcaggtaccactgaatcagctggattaatatgttcaagtgcactccaaaagaagagaagctctcccgtctcaatgtctacttcttgaatagagtaatcatcaaaatacccgcgtaatggtccaccatacttagataaatctgcaggtacttgttttactgccgtaaacaaagccgtattccgttcggtgattgtaaactcatgcacatcagctgtaaatccttttttagcaaataattttttaatgaccttataatgctggttgataatttgaaaataagcaccaggttcaggatcgcctgctggaaggtttggggttgcggtttgagttcctgaaattgttccttgccacatcgtaagaacaggattcccgcagtacatttgtactcgaaagtctgtgttttggatatatctactagcaagtggtctaaaccacattggattccctgtctgatccataattagtgccccagtttggccaatcatcgctgcttcatataccgtatagggcgcaacaaataataggccgggagctgttccgggcttatcaacattaatggtaaccttcatgggatgtaaattaggagccgaaacaaaattccatacttgcgggtttgaatgattggtggatgattgtgaattaaaattatccattcccactctcatctcctctaaattttattattagcactgtcgagctattaatatgtcatttacgtcagaatatgtacatatgttttaggtttacttgtgtcttttgtttattttaaatgttaatatgtaaagacacatgaaataaatgtaaaaaacgagcccttagcagataagagctcgtttttcttgttcatataccattatatattatcgatgcagcaatattttaatcgtgtttaaagttgaactactaaatagataataagagatttcttttatgtctaaaacacagacaatttcaaaaactttatgtataataaatgctacatttttattaatagctaagattaggaggtataaataatgatacaagactttaataaatatacgccctttgattataaccaaataaaaaataacgaacttgttcatagatggatgagacctctttccgctaacctgatagaaggtcaaacattaaaggaagccattcatttactagatatgcacggtattgaggggttacctgttgtttccgcacaacagaaagttataggggtgctgacaactccggaattattgagatccttaactggatgccactcactaaataccaaagttgaagaagttatgaagccttcaataaacagtgttagtcctcatgactctattgacacagcttggaaaatacaaggagggattttacctgttatagatgaaaaagaaaaattggtcgggttattaactaaaacggatattcttcattcgtattctttctatttaaagcatctccaagaaaatccttatgctgttgaaacattagacgctgttctagaaagcgcttacgaaggtattgttattgtggacacaaatggaattattaaggagtttaacgcggcctactgccgttttttaggaaaaaaacgtgaagaagctattggaaaacatgtcacagagattatagaaaatacccgtgtgcatatcgttagtgaaacggggacagatgaaagaggttatgttcaacgtatccaaggtcaagacatgattgttcatcgtattccgattagaaaggaagagaaaattgtaggagcaattggcatgcttatctttgaaggcgtcagtgagctttataatatcttaggtcgtatgcaggaattgtcccgaaaagtaacagaatctcatttgccaaatcctgaacaaatagagaataacaatcattttgatcaaattattggagaaagtcccgcaatacaaaccgtaaaagagattgctagaaaagcagcaaaaacaccttctaccgtattaattactggagaaagtggcaccggaaaagaattattcgcaaaagcaattcactattctagtccattttcagaaggaccctttgttagtatcaattgtgccgctattcctgaacaattacttgaagcagagttatttggctatgaggaaggagcatttacaggagcacgcaaaggaggaaagccaggtaaatttgaacaagctcataaaggtaccttatttctagatgaaattggagacatgcccctacttatgcaagctaagatactccgagtattacaagacagagaagtggagcgagtcggaggaatgaaaagtcaacatgtagacgtacgaattattgctgctactaataaaaggttagaagagctagttaagaagggagagttccgtgaagatttatattatcgtttaaacattattcgtttgagtattccgccacttatagaaagaaaagaggatattcaaatattactcatacaccaccttaaaaatttttgtgaaaagtttggaatcattaaaaaaagcttttcttttgaagcaatgcggtatttacaagaatatcaatggccaggaaatatacgggaacttgtcaatacggtggaaatgttagtaagtctagtagaaaatcaagaaattacggaagaagacttacctgctcattttcgaaaaaaagatacaagctcttttataacagaaaaaaatagtgatacaaacagactcttaaaaaaggtaagagaagatattttatctagtgaaaaagacactattttgagaacgcttgctgacgtgaacggtaataaggctgctgccgcgagaattcttggaattcagcgttctactctttacataaaattaaaaaaatacggattatagttcaagtgtctgtataatcggacatatatcaaacacttatgtatttaaaaatggacactttaactaaaagaagcctttggaattaagcttttataattggcacggttcttgcattaataacagtgacgttaatgtaaggagggattttatgaaagggtattcaaaattttgtatgcctaactcagtcttttatggggaaaattctttagctcagcttggagagcaagtgagagcttatggaaagaaagtacttttaattagtgatcgtgttatggaaaaaataggacatgtaagaagttgcgaaaaaatactagaggatttaaatgtttcttatgctgcatacttagatgttaatacagagcctacggatttacacgttaatgaagcattaaacctgtgtctaagagagcaatgcggtgttattatcgcaataggtggaggaagctgcattgatgctgccaaagctgtagctgtagtagcaaccaatggtagttatattggtgattttgcaggcggaaagtctccaattacagaagatcctcttccgcttattgcaattccaactacggctggaacgggttcagaagtaacaaatgttaccgtaattacgaataccaaggaagatataaaaatgatgattaaacatcaagcatttcttccgaaagtagcgattgtagatccaattttcacaatttctactcctccacaagttacagcagcaacgggaattgatgcactttgtcatgctgttgaagcttatatatcacgtttatctcaaccgttaacggaaacattggctctttcatcgatagaagctattttgaaccatttaagaaaagtttatcaagatggagaggattcagacgcaagggaaaaaatggccattgcttctatggaagctggacttgcttttagtaatgcttctgtgacgctaattcatggaatgtcccgtccaattggtgctttatttcatgtacctcatggtatttcaaatgcaatgttacttccagcggtacttgaatttacaaaggaagctgctatcgattcgctagcaaaaataggacatctaatttatccagaatcgaaatcattaaacaaagaagagctagctgatgtggctattgagaaaataaagcaactttgttgtgacttagatattcctaatatgaaagcatggggaatagatgaacgagagtttcaaaaagtagttgataaaatggcaacggatgcactagcaagcggcagtcctggaaataacccaaaagtgcctactcatcaagaaatagtggatttgtactattactgctataactacaatttttcaagaagcaaaaatactgttgaatcttaaaaatctactagtttatctaaaaggagaatggaaaatggaaactacaactaatacaaaagtaattcaaaactatattgccggtgaatgggtagagtcatctacaaggattagagagaaagtctataaccctgcaactggagaagtaattgcagaggtgcctctttcaacaaaagaagatgtagatcaagctgtccgagctgcgaatgaagcatttaagggctggtccaagacagcagttccaaaacgggcgcgaatcttatttaagtatcaacagctattagtagataactgggatgaattagcaaggttagtgacgattgaaaatggaaaaagctttaatgaagcacatggtgaagtacaacgtggtattgaatgcgtggaatttgctgcgggcgctcctaccttaatgatggggaaacagcttcctgatattgcgacaggcattgaatctggcatgtaccgctatccaattggcgtaattggagggattacaccgtttaactttccaatgatggttccttgctggatgttccctcttgcgattgcttgcggtaatacatttgtcttaaaaccatctgagcgtacgccgcttttagctgcaagattagtagaattatttgaagaagctggattgccaaaaggcgtattaaacattgtaaacggcgcgcatgatgtggtaaatggtcttcttgaacataaattagtgaaagctatttcttttgttggttctcagccagtagctgaatacgtatacaaaaaaggtacagaaaatttaaagcgtgttcaggctttagccggtgcaaaaaatcactcaattgtactaaatgatgctgacttagacgtagcaacaaagcaaattattggtgctgccttcggctcggcaggtgagcgttgtatggccgcttctgttgtaacggtacaagaggaaattgcagataaattaatcaatcgtttagtagaagaagcaaacaacatcgtcattggaaacggcctagaaaaagatgtcttcttaggacccgttattcgtgaaaatcacaaagagcgtacgcttagctacataaaatcaggcatagaggaaggagctcggttagttcgggatggccgtgaagatagtgcagtaaaagataaaggctattttgtagggccaactatttttgatcatgtcacacaagaaatgaaaatctggcaagatgagatttttgcaccagtattatcgattgtacgtgtaaaatcactagaagaagcaattgaggtagcgaataattcccgatttgcaaatggtgcttgcatttacacagatagtggtgcaagcgtccgcgagttccgtgaaaatattgagtcaggcatgttaggagtcaatgtaggagtgccagctcctatggcgttcttcccattctcgggctggaaagactctttctacggtgatcttcatgcaaacggcacagatggcgtagagttctatacaagaaagaaaatggttacggctcgttactaaaaagatatttagagacaaaggggaagctttaagtaattctcattaatattgtccaaaaataaatgtgtttgatattaatgcaagtgaaataaaaatcacatagtcgcaaagaccttttccactaaggctttgcgacttttttgtgttttaataatattatagagacatttgcctgaaaattgaaatgtcacgggattattttaattcctcttagtatttattaaaccacttttttattaccttttctcaaaaaatgataataataatataatagtcaattgttaaaatagaaatatatctagtctagttattaacgagtttttatattaagaaaacgtactatagagggaacagggagaggtaaatatgaaaaaaaaacaaattaatgcaatagaagtggctaagttagctaatgtatcacaatcgacggtttctagggtatttactccaggtgccaaggtgtctcctaggacacaaaaacgcgtgttagaagctgctcaaaaaataggatatcgcccaaatgctttagcaagaggattaataactaataagactaatataattggacttgtaatgggtaatattcaaaaccctttttatccagaaatccttgatgaattcacaaaaagtttgtacgaaaaagggtatcatgtacttttttttcatacaaagaatgatgcaattacccaagatgaagtatctcaatttcttgaatacaatgtagagggtgtgatagtgacagacgttttgctatcttcaaatgttgtctccaaactttctacacatgatatacctattatccttttcaatcgatatacccaagattctacctgtcattctgtatgttgtgataattattcagcgggcatgaaaatcggggaatatttatttaaacaaggtcatcaaaagttcacttatattaccggtcgtaccaatacatcaacgagtcgtgatcgtgagaggggatttgctgagtttcttttacaaaaaggaataaaaccggtaattgaagaaggtgattacacttatgaagctggttacactgtagcaatgcgtgtactaaaaaatagaaatcgtccggatgctattttttgtgcaaatgatattgtagctttaggagtaatagatgctgctaaaatattaggaatatctattccaaatgaattgtcaattgtaggatttgatgatatttcaatggcctcctggcctccttattctttaacaacttggcagcaaccagtaaaagaaatgattgaagcaactattaatatgttattaaatacagtggatggagaagcgaccaagcctcaatctctacttttttcaggcaagcttcttgagagaaagtctgtaaaacttctcaaaaatagttgacaatgaaagggctatcatttatgatttagtagacacaatagtgtgaattgtgcaaataataggttttttctaaaagggatacataatatctcttttgtaactaaaaatgcatacgtatgcaaatagctttttattaaagttaggaagcttactattaattgaattaatactactatgattttaaaattctgtttcaaaatgcatacgtatgcattttgggaatgttgttaaatgaagcatgaatttaatgcatacgtatacaaataaagggagagatttgtcatggcgaaagtttttaaacaggggaaaagtcaggaagaaattaatcaaaatgatatgcaagtatcagcaatagtaagtcaaaccattaaaaaaattgaggacgaaggagatagtgcagttagagaactatcaagaaaatttgataattggtctccggaaaatttcagattgagcaatcaacaaatcattgagatcgtgaatagtgtaccaaagcaaacaattgaagatattaaatttgctcaaaataatgtaaaaagatttgctgaagaacagagaaaatctatgctagacattgaagtagaaacattacctggtgttattttaggccataaaaatattccagttggaagtgttggatgttatattcctggtggacgttatcctatggttgcttctgcacatatgagtgtactgacagcaaaggtagctggagtaaatcgagtgattgcttgtactccacctattggaggagaaattccatcagctacagtagcagccatgcatttagcaggagccgatgaaatctacattcttgggggaattcaagcaatggctgccatggctgttggtacggaaacaattgaacctgtagatatgctggtagggccaggtaatgcttatgtggcagaagcaaaacgtcaattatacggtcgtgttggaattgatctctttgcaggccctacagaaacattagttgtagctgatgaaacagcagacgcagaaatgattgccactgacattttaggacagggagaacatggaccaacttcaccgggagcattaattacaacatctgaaaagttagctcaagaaactgtaaaagaaattgaacgtcagctcgaaaagctcccaacagctgatgtagcacgtgtttcatgggaggattacggaaaaatcataattgtagaaaatgaacaggaagctttaatagaagcagacaaattagcttttgaacacgttgaaatcttaactgaaaatccagattattttttagaaaacatgaataattacggatgtttgtttttaggtcctgagacaaatgtagcttacggtgataaagtcattggtacaaaccatacgcttccaacaaaaggagctgcacgctatactggtggactgtgggtaggtaaatttttaaaaacatgtacttatcaaaaggttacagaagaagctagcgcgcatattggggaatatgcagcacgcctttgtcaactagagaacttctctgggcatgctgaacaagctttacttcgcgtacgtcgttatggaaaagtaacagcaaaataaccaataaaagggatgcataaactttttatgtatcctttttcagtaagtttttgttctttagatgaattactgattatccctattaaaatattgaaagcgtttgcttttagagggctagcggtagaattactagagcttaatatggtttaaaggctaaaaatttaaactaagaaagaaaatataataagttgcgacgagaaatatagggggagaaacaaatatagggggagaaacaatggatttagtcatcattatacttgctttagggctcttaatgcttattgcttaccgaggtttttctgtcattctttttgcgcctctatgtgcattacttgcggttatattaacggaacctagctatgctttacctttcttttctaatatttttatggaaaagatggtcggctttattaagaactattttccagtctttttattaggagcagtttttggaaagttagttgaaatgtctggaattgctgaatctatagctaaaacaatcataaatttagtgggtcgaaaacgagctattttagctatcgttctcatgtgtgcaatattaacttacagcggagtcagtttgtttgtagtagcgtttgccgtttatccatttgcagcgaacctttttcgagaagctaacattcctaagcgacttattcctggaaccattgctttaggagctttatcttttacaatggatgctatgccgggaacacctcaaattcaaaatgtaataccgacttctttttttaagacagatatttatgcagctcctatattaggaataactggatcgctctttgtactttgcctaggacttctttatttggaaagacgccgtaaaaaagctcaaagtgcaggtgaaggttattttggttttaatggtgctggggaagagatagctgttgctgctgaaacagttaatatgtcagctgctccttctactaattctgctagtattgggcgtcaggtattagcatttgttcctctgattttagttggagtggccaataaatttttcactatatctattccaaagtggtacccagaaggttttgatttttctaagttaggtttagaagcctttggaaaagtagacttagcaacagtaacaggaatttggtcggtagagctagctttagtgctaggtattattacagcacttgcctatgactggaagcgcgtgactagtggatttcaacaaggtattaatgccagtattggcggagctctgctagcagctatgaatacaggttctgaatatggttttggtggagttattgcatctcttcccggatttgcaactgtacgggatagcatctcacatacttttacaaatccacttattaatggagctgttacaacaaacgtattagctggaatcacgggttcagcatctggcggaatggggatagcactgagtgctatgggagataagtatatacaagctattacacaatataatattcctcctgaagttatgcaccgtgtcgtagcgatggcatcgggtgggatggattccttacctcataacggagccgtaattaccctacttgctgttactggattaacccataaacaagcttatggagatatctttgcagtgactatttttaaaacactcgcatgcttctttgtaatccttgtttatagtttaactggtttagtttgataatagaatctatgaatctaataaaaggaggattatagtgacttatttttctgaactcaaaggaaaaaaagtgctggttactggaggtagtaaagggattggtaaggatattgctttggcgctcgctaaacaaggggcagacgtagtcattacagggcgtaacgaagctgatttagtgtcgactacaaatgaattaaagcggattcatcccaattctttctacttaaaagcagatatacaagatatacaaagtgtgcatgaaatggtagataacgcagtttctacattaggtaatattgatatactcataaacaatgcaggcattaatattgcaaaaccagcactagaagtaaccgaaaaagattggaatcaagtcatagacaccaatcttaaaggaacctttttctgtgcacaaagagtaggcaaacatatgatagaacaaggaggaggaaagattattaatatggcgtcccaaatggcttttgtagggtatattaagcgctctgtctattgttctagtaaaggcggcgcagttcagttaacaaaagcacttgcagttgagtgggcaccctataacgtaagagtaaatgctgtggctcctacttttatcgagacagattttacgaaagaaatgtttgaagatgaggaattttatcaggatgttgtttcccgtatccctttaggaaaattggctcagccctccgatgttagaggagcagttctttttttagcttccgatttagctcagtttataacaggagaaacaattaaagtagatggagggtggacagcaatatgagtgtttctaaagaagaattagcaattataggttctggtacaatggggcattctatcgctttatctgcatctatagcaggcttcaacgtgaaaatttggggaatagatgataatgatattcaccgtgggaagcaaggtattgatgaaaaattgaatttgttgacaacgtatgaggtagtggattctaatgagataaaaaatataaaagaacgtatctactttacaaattcattaagagagtgtgtaaataaggcgagtttcgtgattgaaggaattccagaaaacttatacttaaaacaaaaaatgtttcaagagttagatgaattatgttcccaaaatgtaatacttgcgagtaacacatccggtttgagtccaactgatattgctgctcttacatcatatccggaaagaacagtagttacacatttttggaatccaggacatttgatccctcttgtagaagtaatacggggagagcagacgtcagaacagactgttaatcgatcgcttgaattacttgaaaacttgaataaaaagcctattgtggttcaaaaagatatccttggttcaattggaaatcgactgcagtatgctttattccgtgaggctcaatatattcttgagcaaggggtggcctcaatcgaggatattgataaagctgtttgttacagtataggtagacgtttgtcggtgacaggcccatttatgacagctgatatgggaggactagatgtatttgattctatatcagcctatctattccccgatttaagcaatcataataaatcgtttagcaagataaaaaaacttgtagatgagggaaattacggacaaaaaacgggaaaaggattttatgaatggtcacagcagcaatcaaaaaaaatgaacaaagaacgtgaacaacaacttatttattggctgaaaagagatttagaagaggaaaaagaacaaaaataagttcctttaatgaataaatgagcaagtaaaccttgagaggaagttatgaaaaagaaaaggatgatccaaagggccatccttttcttttattttgatactagaagaggctttgaggttttcggttttatactgacaagtattatactgaaaatgactaataagagacctactagtagattcattgtaattggttcttttaaaaataatgaacttgctgtaatagaaataatagggattaaaaaagtataggtggaaactttgcttgcttctcctgaactaacaagtgtaaagaaatcaagccaacccagagcaatgacgaacacagatatgaacaacaatacggcgataaaagccggattccatgaaatagatgaccagctttctgtaagtgttccggaagccattaaaaataatccaccaataataatgtgcagtgtagtaagccaaattccatcaactttattagaggtttttttcataaatacagtaccaaaagcccaacttaaagcagaacctaatgcaagacaaatgcctgtaatagaaatatggccttttaaacctccaagacaaatgacaagaacgcccgcaaatcctaaaataagacctaatattttgaagggatacattgattcaccaagccaaatccaagaaaataatcccattaagattggttgaaagaaaacaatcgcggtaaaaagtccggccggtaaataatttaatccaatcgtctgaagtccatagaataagatgatattaaatagtgcggatataaaataaataggccatgtctctttaaaacgaagcattttatatctaggaacggcaattatgagtaatatgattccgccgataaataatcgtatacctgcaaataaaagtggtggagagtagtgcagcgcgaatttcgttagaggccagtttattccccacataaaaacaagaaatgcaagaaaaaatccaattcgcgttttagaatattgcttcatgataaaacctccttgttatgattacattaaacatgatacgataggaagatgaataaagaaaatgaatgttttttataaggagtataagtaatcacttatgataacaattacacaacttcaagtattagtaaaagctattgacacgggaagttttacaaaggctagtcatgttttgaatatgactcagccagctgtcagccatgcaatatctaacttagaagctgatttgggcgttaaattgcttctaagggatcgtaaaagaggtctacttttaactgatattggggaacgtattttagtacatattcgagcagtattaaatcatattgaaaaagtggaacaagaagtagcagctgaaaaggggtttgaagtaggaacaataagaataggaagttttcctagtgcatctacgaaatttttacccggaatcattaaagtttttaaacaaaaatatccttctctccagctaattgttcatgaaggaacattagatgaaattaaaagttggctcaaatctaaagctatcgatatagggtttatcgttcttccaagcacaagtatggatattgtgccgattgctaaagatgaaatggtagttttagtaccaaaaactcacgctttatctgaaaaaaattctattagtattaatgacttagataatgagccattaattttgtgcagaggagggtttgaatctcccattatagatatgtttaataaagctaaagtgaaattaagagctgaatttacggtttctcatatcaatactctattaaaaatgattcaagaagacttaggcttggccatagctcctaaattttcattaacaagtgtacctgaaggaattgctataaaaaaattagaaccaaggttttgtagagaaatcgcactagcagttccagcgttaaaagaagcgtccattgctgtaaagttatttattaaggaaatgagaaatctagatagtgaagctgaataagaaaatgaaaagcctctccaatattttaccaaattaaagtcttcttcaactaatagagaaaaaaagaatagctaataaaaaacatttcttaattttgaggaatcacttcattcgatacttgattggatctttcacttatttactggtaacacttgttatagcatggaatatagatttgtcttgattatttctctatatgatatgtatgttaacttgaaaatcgtgtaataaattgagtaaataatgataaggaaagcgagagagaattagaagaggcgaaagctcaattgattcataacatacaaaggaatctttattaatgcagaggatagggaatataacgactcggcaataagaggctagtttgaacgaatctaagatgactaaaaatggttagttttcgtagtctctaataaagtaggactagttaaaagcgtggattaaatctaacccacgcttttatagcgggagctcgttatatcaccttaaaatgaaaatgttaagtagagagtttcctgatatcagagtaacaaatacaaagtgtattctcatattcagagtcgtatcctgtaaataccagatttttttctttattatcatagtgaaatccgattttctttaaatcatttctcaatatatcttcagtaattttgatggaagaagcaatatcttcataagaagcaccattatttaacttttgaacaatctcacctattaacaagttatgacctccagtagcatatgtttcttaagtaataatttaacctaaacagttgcttttatgaaagttgtgttaaaggccattttagattattggaacttgcattgagtatttcgtttgctaactactagattaattctttttttcttttacgataatcagtaaaatagtaaattaaagttatttcaataaaaaatcaatgaaaagaccggtgagactttctatttgcacacctttttcttcaattaattggcggtaaatgactctgaagatcacaccaacaaaagagagaataacagccgctgtggtactacgtaaaaagtcaatagaatcacacccttttttaatctattaagaacgcttggacaagaaacttaaggatggttatcacttgtttccatttaacgtaaagctaacagataaaaaagagaatagatggaagtgaagtaaaaaagcaaagagaatattctctttgcttttttcttgttttcatattcatagaagctacatagtaaattatatatataacatctttgttcaaatacttactgctctttttctgataccatttcaactttacctggccagaaagcaaatcttcctaaaaccgtagtaatcgcaggtacaaggaatggtcgcacaataaatgtatctaacagaacacctaaagccgtgataattccaaactgaaccagaacttgaataggcagtgttgctagaaccgcgaaggtagcagctaaaatgattccagctgatgtaataacaccgcttgtttcgcttacgccttctttaattgcttgctttaatggcatgtgcttctttttctgccagatgcttgagatcataaagatattataatcctcaccaagcgccactaaaaatacaaatgcatataaaggaatcgctccttgtatagcatctgcccccatgatgttgtgaataatgagccagcctaatcctaaggctgcactgtaggataagataaccgttccaaccaagtaaagcatggctacaatggaacgcaagtaagccaatagcaggagcgatataaaaataataattaatgggacaatgatactgtcgtctttatcactaactgtcattgtgtcatactgtgttgctgtttgaccgccgatccatactttggatttgactgcggaaactccggactgtgacagtgccttttcagctgcatctctcaagtctggaatagctatcattgcttctatactatatggattcacattaaacataacgtcatatacttttagatcctcattatttgtaccactttgaggtgcagaaacagtactaataaggtcatttttctttaatgctttttcaaggtcaaccgattttccttccgtatcaatgactacttgtgctggtgctagttcaccaggagagtaagcatcagaaataatcgtaaatccttcacgagaaggcatatcttcagggaaagaagacaataaatcatatgtgtacttgatttgactagagtaaatggataaagctccaaaaaagactagacaagctacaatgattgtccatggtttagtcgtaaccacattaccaatccaattcccgacacggtttttcgcttttcggtcacgcaccggttttcctttctttttcgccaattcctcttccatttcaggagtacgagggacgaaaggataaaaagaacctcttcccataaccgaaagcagggcgggaataagtgttaaacttgctaatcccataatcagaatagataagctaaaagggattgcaaaatgatggtaagcaccgtattttgctacgattaaagctaaaagagagatgacaaccgtaaagccactcatcgctatagcacctgaagcacctttaaaggcgttgataagtgcttgtctcttgtcttttactttgcgaagctcatcgcgataatgagaaattaaaaataaacaatagtctgttccggctccaaataataaaacagtcataatggatatggactgcgagtcaaccgtaatccatcctttatctgctaaaataccgagaattggactcagcaccccataggcaaaacctacgccgattaaaggaataatcgctaaaattggggaacgataaatgacaagaagtaaaattaagaccaataaaactgtcgcaattagtaacgaaacgtctgctccttcaaataagctcgttgcatctacttgaattcctacaggacccgtaacgcgcgtgcttaatttatctttttcatcgatatctgtcgcaaaagaatcgtatgaaacgttttcttttacttgttttttaaccgtatctagatttttttctagtacatccgtctcaacgttttctttaaagaaaataggctgtacaagcgtggtaccatcttttgatatcattttttgtagagctgctaacggtaatttgtgcaaaggcggagtagacgtttgttcttctaatggtttcttttctaaatctgccgccacttgctgaatagattttaagtcatcggtattcaaacctgaatctttatgccatgtaagcagggcaggaacccctgaagagttagggaattctttctttataagattttcagcctctacggaaggtgaattcttacttaagtttggtgcattgttcacttccgttttattaacggcaggccaagcaattgttagaaatgcagttgccagaatccatacggcaataacaacccaacgactcacttttccagtcatcaatcgactgaatgttgctaaaggtgattctttcattaattctccctcatttccaaatctgtttgtttctattacaatatatatagaaccttcgataattatatataccagaaggttaattaatcaactagtttaaatgtgccaatttcttgaactagaaggagggcccttatgaatactgataagacaccgaaaaaaaagcctggcagacctaaaataacaactgaaaataatataacaagagagcaaattttaaaaacagctgcccatctctttatggcatatggatacgaaaaagtttcaatggagcaagtggctgaagcaagcgatgtgaccaaggccagcgtttactactattttaaaaataaggcaactttgtttaccgtttcggtatcaagtatgttccaacgtatcacaaaacagacagaaaaattattacaaaactccaaagggctgaaacacagattatatgaggtaacattagatcatttaaaaagaccgcatattgattttgaaacattattgcaagaagcgacttcttcgcttacagaaggtcatattcatgaaattcgtgaagcggagaaagcaatacatgaggcattggagaacgtattcaagcaagctgcaaaaagcggtgaaattgtcgtagcaagtcccagattgcttgcgcatacattttccacggtaacaatgattcggaacaaaaaagaattaattacagaattaggaggccctgaaaaaacggctcaggctctagtggacctgttttgggtggggattagtcctaagtgacgtttttattccagcgtaaaaaaagaaataaaaagcggctaaaacatattgatcaatatgttttagccgctttttatttggccgtaagtactttgtggaaatcggtaaataatagcgatgattacatgttaagtgacaaacttataaataaatggtggttcaacgttttcattaacaacctaacaaggcgaagttatatgatgaaaacgtaaaaatttaataatttggtttttatttgtattttaaataatactttataaaaggttagtgttaaaataatgaaaatcctagcttttagagttgcgtttagtatatatggttattctattgtaaacaaaacctttagtataacagcttatattttggaaaggggaaaattggatggaatctatttggcttgaatatgtgtgggcactattgattctaatcgggttagaggggttattatcagccgataatgctcttgtactagcagttatagctaaacatttgcccgaggatcagaaaaaaagagcgattaattacggaattcttatggcatttatttttcgatttggagctctttttgccatttcatttatcgccaacgtctggtggatacaagccgtaggagcagtttatcttctgtatttaggtttaaagcatgtcattcaggcgcggtttgggaaacataatgagaatattcatgatgatgatgagaaggagtctgctggaaaggggttctggccgacagttgggaaaattgcgttagctgaccttgcttttgccatcgattctattttagctgcagtggccatagctcttggacttccggattcacagtttggagaaatcggtgggatggacggagggcagtttgcagttgtagttcttggaggagttgcaggccttatcttaatcaagtttgcagcaagctggtttgtaaaactccttgaaaaacgacctgccctagaaacgacagcatacgccattgttgcctgggtaggtgtgaaacttgctgttattacttttgcacataaagatattggtgtcttagatccccattttcctcatagcaccatctggactctaattttctatggagtattagttggtattgctctattaggttggtttgcacctggcaataagtcatcagaaaaatcatcggcctagaaggtaatcgagtgtgataatcaccctgaattcatcaattaaccttactctttccttccaaacggatcctcgctttaatatttaaaagcatgtttagattttatagaaaagtgagttttggtgattcaggtgtaattatcaagtgcgttaatccaagctgggttaacgcactttttaattgaaactttttaattgaaatggttgcgcaaactaacttggttattttatttctgatttttgtgccttttacgatagtcagtaaagcaggaaattaagaaaatcccaataaaaaaaccaataaaaagaccgataagactttctatttgaacatctttttctccaattatttgaccgtaaattaccctgaatataacatcaacaaaagagagaacaaaagccttgatggtaatatgtaaacaattaataaaatcacaccttttacaaaatgtattacgcaattttaaacgattaaaaaggtctagaaagaaagacttacaatttaagattcattgaagggttacatattacacctaaagggatttattctgcaatacaatagaaggtcaattgcaaaaacaggtgattatttttgttagttttaatattcctgtttctttttctaaaacttttaaaaaataacgaatacttgtttaaatggaattgatttgggaatataattcacaagtcaaaaaaatgacaaggaggatgaaaacatggcaaagggactagctatgcacgaaacgctagaagttcatgaaatcttaacgcttaaaacatcatgtgtaacaaaaggaacagcgatgttggaattggtagaggatgaggaattaaaaaagattcttgaagaagatgtccaagcatctactgaagcgattaaagaattgaaaaaaatcttaaagaaagctcaataaataggaggggtagaaaaatggccactaaaagtactcttactaaaacgttagacgatcttgctattgcgactgatttattattgtcagctaagagtggtgtacgaacatatgctgtagcgcttacggaaacagcgacgccggaagttcgaaaggtattaaaaaaacaattaaatgaaaccatcgagcttcatgaaaagattgctcaatatatgattgataatgaaatgtatcacgcctatgatgtagaagaacaagtaaatcacgatttaaaaaaggcagataaagcgttagatttagcgaaaggttaactaaaattccccctctgacaatagagggggaattttttaaggttacataaaaagttctcttttgatatttctacaaaggaaaagaagtctatattttattctcttagaagtagataacttaccccactttatacaatatttagatgatattttatagtcttttatcccatatccgaataaattggttttaattggctgctgaaggatatacctattagtagaacgacatattctatggggatagaggaggagaaaatagtgaaggaaattaaagtagcagaaaatagtggtcaggcaaataagtttattgaagagttttttgctaacgggtttagtaaaaacgaaatttatttattgacctataataaagagcgctcggaatatttaacaaatacaacaaatacaaaagaatatcgagcttctgaacaaggagtttttgaatccgcagttaataagttattttctcgtgaagatgaacttcattctaaaatggcctcgttaggtttaacccaagaagaagctaaacagtgtgtcggtgaaatgaaacaagaacgtataatcattattgcaaaaaaagatatgtaatggtttttcctgggaataactttcgaagaaactaactgatcgagaactattagtaaatcatactagcatgttgctttatatataatatttgttcttctgtacaaagggtttatgaataggaaagctactgaacgaaaagtatattactagagtcgtttactactctcatatggaggtgaaaggataatgattcaattttttggtatccacatagggacgttatactttcctacaagtatccttctaattactttattagttttagtaggttttattatctattttcttagtagaagaaaaagaaatagagatcaaacgattcattcaaatgagaatagggtaaagggcaaaagaggaaaagataaaactctgtaaatgatctaaaagaagaattaatatatttcgtcatcaaacagaatttcagtttgaagtgaaagtaaatcattctcaccttacagttcctgataagccttacaccatatttaaaccttgagaaggtatgatttaaataaatgcagagagggcccttgaattcatttccaagggctgtttttatttgtattctgtaaaggacagacgaccttttaatcttttattttcttactatttcttatttataacttcaaaagaaactttattatcgttttttaagatcttaaacaagcaattgaacccttgataaatttgaaatagtagtctaaccttcatattaaggagtgaaaattatgaacgaaaacatttcgggtattgattatcaagaagtcattgaatatgcgttagatccactcattattcattcaaatcataagattatatatgttaaccacgcagctgaacatttttttagaggaaaaagggaagatatcataggtgccagtcctttagatatatttcaagaaacatctaaagcagcaataaggaaaagaatccaatctgcttatgaacgtccagcagagcttattgaggaaaccatatttagattggacgggacaactgttaatgttgaattatattgtcatcccttgctgctgggagataaaaaagtaatccaaacctatgtgagagatattacggtaaaaaaagagagtgaaacaagacaaaaagaaataataaagcaaataaatgaactgtctacaacccttgttcctcttttagagggaatcgctgtacttcccttagtaggatccatagatgagcaaagagcaaaccaacttttaatggctgttccagtaaaagtgcagacgcaaaatataaattgtttaattatagatttttccggtatttatacattgaattcaattgtaacggagcatctttttaaaattaatagcgttatgtcactacttggagtgcaatgtatcttaacaggattaaggccagaattatctcgctctgctgtacagctaggtattaatttagattctacccggacaatggctactgtaaaaaacgcacttcattttttgggaattacttctagtaaataacctgtaaaatgaaaataactaaagtaacttctacgtttttaaagatacatatgatatgaatctttagatggtgctactttcagaggaagtttcttattaaagaaatagtggcatcgtctttatggtttcgtgctgttttaaatatttttagatggttttttaaaattagatttgtatcttgtatacattagaaaaacaaaagaaactcctgaacatataccaggagtttcttttgtttaaaataacatattgtgcaatcgcacgtttgttaaataaaagatagaagaatcattgaatcgctttcttcagtttaagatcttgtataaagcttcagaagcgttatctatatcataatcgttataatttaaggttttttgatccgtaagtgtagtgatttgaaaaatcttagatgttttacaatacgacagttccagtacttgaggaatggtatgagtaatagcactatcctcatattgaatcagagtataaagcgtcttttttatttcaagtatattcataaaagtacctctttccattataaggaaacccagggtacaaagagaccatataattttaatttatgttctttctctattgtaacatatgaacgtatagaaaaatacctgtcgagaacagacagtatggtaactgcaattgtaaattctatgcacttctaattttgctagctggtcagttaaaaaggtgaccattaacagaacatgttcttcttataatagaattaccttgaatagattcagtaataaaaaagagtagattattaatctactttatggctttataaacaactggtgaggaaagtttaatcaatgtagatggctgcccaaaagccatagattcatcaatgaatgtttcaagagattgaacggaattagttaaaacttttactaagtagttgtattgacctgccagacgatgacattcgataacttcagggtgttctttgcaatattctacaaattgtctgcagtttgtattgctgtataaaataaaagcagttacaggtttgttaaaattttcaggattaattattgctctatatccatctattatatttttttcttcaagtttttttactctttcattaacagcaggggtagataaaccaaccagctttcccaactgtgtaacnnnnnnnnnnnnnnnnnnnnnnnnnnnnnnnnnnnnnnnnnnnnnnnnnnnnnnnnnnnnnnnnnnnnnnnnnnnnnnnnnnnnnnnnnnnnnnnnnnnnaatttatagaatacaatttaattatatcaaaaggagggatttaatggctttagaaatgagaaatacatgcgaaaagtgcaataagaaactccataatagctctgttgcttatatctgtacacatgaatgtacattttgtgataaatgtagtgaaaacgagatgtatatttgtcctaactgtggaggagaactagttaaaagaccaaggggtaaagaacattcgttaagttgctcactgagcttgtcatgaatttagatgcaacactacatagatagtgcagtcaaaacagctactatcaatgaggtgggcattcaacagcgagccgcaacaggtttaagtacggaacaaattataaagcatcatagtgaaagtttacatggtcattgcaatgttgcacactttcaattgtcagagaataaggtaattcttcttgtttatgtgaagcaagctccatattaatatcagttattgcgttaatcgtcggaagatggcctctttcacctcgcagtgatttgataagcgcattacgaaatgctgtattcgtttgtgtcatgttttttcagcctttctttttcaaagtattaagcttgtaacagtctaacacaaatcagtttaatatatgtacttctgtgattaacgacttactataacaaagccactaaaataaatagtatcaatcacaattttttgtttgtaagtcacctttatatgaagaaatatggtttaatataaaatatatagaaataagtagaaaaaggtaccctttatggaaagtgaaaaagattatgtgattttgagaaagacgataacaactctttctacaagctttattttagcttaccttttgacaataacaggtctggttcaacagctaactgacggagaagaactatcgtatcatactggaaatgacatggcagggtggttccttgtatatcttttttatgtaggggcagttattgctgtatacggaaattttgtctcagttatactggacgctattcgaaagaaatggcttcccaacatgagatggctatttgtcttcttccacggcatattaggcttaattaacggcttgttttttcaagatacatatttggcttattacgggatggcagctgctatgttatatgcatgtatagatgtgtggatagaaagaagaattgacagggaaaaaagtacaaaagtattgctaattatacctcttattcttttacttctcagttggagtatactagaagcaatatcacctagtcttccgccatttacgaaagaagatgctatagagtttgcgacaagtggtgaaggaacggatattgatctatttcctgataaagcgggaacgtggaaaggaacgtttgagggatatcacgttcaaagaagcacccgtgctaaaaagttaaataaagagttataccttgtgacctttgaagaaaactggaccaacgggaaacgaaaaggacactatgtaatgtcttataaagtaaatcgcagcagtgtctcagggtatggcggaagtgatacaacacctccttattatgaaaaggtattagaacaataaaatagtaaaaattaagtttatgaataaaggagctttgatctatgtctaaaatttccctagcagaggctgtgaaattgaaaagtgtattatcaaaacgaatacacgaattagaagaagagatggatcgtgttgcatttgtagagattgaaaaaggggagaagattcctcctcaggctcgatcactatctgatgttgaacaggatttagaggacattcgaaaggatttgcgtctacttgataaattaatgtatcaggccaatatccaaaataatattacttataatgaacacaaactaacaattgtagaagcgattgaatatgccactcaattacgtgctaaagcaagaaaatacaaagagtttggatcatcgtctaaagaagaatatccctactatggagaaggggtatccattattaaagtggctacatttgatcctgaagaatatcgtctaagagggctagaggttgaaaaaaaagcaaatagattatcaaatttaattaacgctaaaaactatcaaatagagttagagtttgatggagataaatatttttaacccttgaagaggtgagactcccttcaaggcatagaaggagaatgtttagtgtactcaaagtactattgtgatggcaagtgataaaaccaataatccaatgacccattacactgttactatttaccaataactaactatagcaatggacggtcgatgaccaatacctccttgtttttaactccttctatggtgcccttacttgtaagttaagtaagggccttatttatcttatttttattagaaagctttcagtataataacacctgtaataataagagtaaccgagataatctttcttttgttttttgattccttaaatatataaatacctaacagcgttgtactaacaatcgtcagccctgcccatatagcaaaaacgattccaatttcaaaatagtgcgtcgttagagaaataaaataaatacaagcaatgaagagtagaaatgcgcctatcgtgggaacagtttgtctaaggcctttagatagttttacacacatttggcctgcaatgcctaaaactaagcccatcgttaaaaatacgtatcccattacgctgtccttctttctttagagctccctttaatgttaagagaaactgcaccgattataataagagaaactcctaaaattttagataaagaaatagtttcatcaaaaaagataatacctgtgacaacaacaagtacagttgctcctcctgcatacaaagcacttgctactcctacttcacctttggcgttaattagcatataagcagcaattgaagaacaataaaatagtatggcgagaacagtaggaacaaagtttgtgaatccatttgtaagattaagaaaaaatactgcgattacctccaagatgatggcaagaaacaatagtaaataaaacaatcagatctcctcctttcagtcacctgattttaagaactttacgtaattgctactaaataattgcaatagcactcggatgtcattattttatctagagcttgatatcttgtaaaataatgataaatgattatagatatcactattattaatacctaaatcaatgtaagtggaaaggaggatgtttatggaagtagaagatatacgcatatttatggctgtagcagaatacggcagtgtaagccttgccgctgataagctaggctatgtccaaccaaatgtaacagcacgtattcggtctcttgaacgaaaaattggacacccattgtttcatcgtcacagacgaggaatgacattaaatgtagaaggtcgaaaacttttaacatatggagaacaaatgatgcggctgatggatgaaatacagaaagcatttcaagatgagcgtaaccttgttggatcattatgtattggattagttgaaacggtagtagggtttcctgaaatcatttcttcctatcataataagcacaaaaatgtggatatttctctagtgtcaggagtaagtacacaattaatagagaaagttcttaagtttcagttagacggggcatttgtagcagaaccagtaaatgtgtcaacgcttgatcaaattccagcttttgatgaagaaattgtacttgtatgcagtgcaaatgaaaaagggaagaagcagattcagtctgccaaagagttgctgcacttaccattcattttatttaatgaaggctgccaatatagagaaagactacagcagtggttaaaagacgaacaaatagtatcaccaaaaatcatggaatttgctacacttgaaacgattatggggacagtagtttctggtcttggtgtgacacttatagcccgatcattagcggaaagatatgagcgggaagggttagtacaactcttttcaatacctgagccttacagaaacctcaggattgtgtatgttcgtcgctccgactcctatctaggagtaactgagggtgaatttataaagacaatcagcgaagtaagagaagggaaaaagcagaaataaacagacggttttttcatacagagcttttttatttaccctatgtttaatatgaatgcaccaagtgttaactagaaaggtaaaagtgagtttttaagctcactttttatatggcataaatcataaatgcttttaaaggagccagcacagtgaaaatagaggaccaaaaatttgcagaacgagtgctgaaacacttacttattggcagtcaaatagacggcctgaaatttgggattaatagttctacaactctattgtattttactaattataatagaaaagatgatggtgattttgttttaaacatcgaaacaaattggactgtatatcctgaagcctgtgatacatacccatcatcagagggtgaagtgccctttaatacagaagagcaacattttaagcatatttgggatattaggagacaaaaagtagtaaacgttcagctagatactgtatcgcctcatcttatcatttctctagaatcggggagagttttatttgtgaatggctacgatcctacctacgaatgctggcaattaggagacccttttggaggagttgattggcttttagttgcaactccgggcggtgacatagctatttggtgtcctagtgaatttgaatgagcgttatgttaactattcttgtatatagtgtacaaaaaaatcacttaggaaaatggtaaaacatatggaggaaacatgcatgaatactatcttagagagcttttatgatttaaaggaaatagtaagttcttttaataatctccatgagaagtacaattggttgttgagtgatttagatggatcttttccagataagtatcttcattactttactgactacagaatttacaacaacagaacgaacactagtacatactggattacaggtgaaaagctcacggagcttgctaataaagaggatatctattttatatggggagttttctcagcctttgataagaaagaaattataaatttagatgtgcttaaagaagagccttatgctgatggtaatccggatttttggattgaagcaccaataattcagcaccctaaagcaattatagaattagttttttgggactcatctttaattttgcttctgagcaaggacgaagaaatatctaggtattttagaaacaagtttgcaaaatggaaagacctagaggagtacaataacgagtagtcttataacttatatatactataaaagaaaaaacatctatcggaactatcctcaggaaacagccacggttaaatggataaatgacgaaacagttgaaatcagtgaccatacattaaacgttaaacaagatacatttaatgctaatgatcggagtaactaaatactatttttaaacaattaagagcttttggtattaattatttaaaaacgggcttaataaacaagcaaagctgaagcatcaagctacacttatttactgttgctaaaatcgtttcctagcgttcgtctagaaaacagcagagtagacattatttacatgtaaaagaataaacattggtaattggattatgtattcaaaagggggagaacggaagaggcagctgaatatgctttacatattcaatgttcttggcgtattgccaaaggtaataaaattgaagatataaacgaacacacgattgtagaaagagttgactcggacgaagtaggagggctaaagatttttttacctcaaggttatttattagaggtgtttccagatacgtcagaagacgatgaatacagcgagttctcgagacttttcaaacggaaggaagacagctctcactttgttgtcacaggaaatggtcttaaaaacgagtaatcctataattaaagaaatgaaaaaagcacaaacccgttggaaacgaacgtttttgtgcttttttcttattttatagtgagttacatataatcataagcggaatcatcaaaatagagccagtgataatattcaacctgcggatctgtcatcttcgaaacttcttcttcattgaatttttgatactcaactaatttctgcactttagaatttctttccacttggctcattttaaatcctccttatagtttgagaagtaacaatgtatttaaatgtagaaagcgttttctttttcttgtttttattatatatctcaatatgagattaaaacaatatcaattatagatgatttttcaaaaaacaatatagaaatggtatcatggcgtcggatagggacaacaaggcttctgcaatcgaaattaaataataggtgattcccaatggcaaggctaaaaattttttgttagtatcgttgcttaatccctaaaaaacattatgataactagctctataaattagaaataaagctaactgtgttaagctagctttatattttttatgctgttttccagagctgtaaattttcaactatcgttcactttgttataaaaactctttaacattttcatcatgttacgccctgaagttcttgacatttgattattatcttcatcatcatgagaactcaggtaccaacttcctttgttatcttcatttaatctatataccttattcgttctactatctgtataaaagtttccatccttcagtctcacacaatcccccctctaccaagtgtctatcctgtattatgcccaagatatcaattttatgaaaaaattcatatacacaaaaacagcagatttcttaatacgcttattattttgtaagtaatatacacaggcgcaaaaaaggataagagctatgagtgagaaaatatttggtgatggagaaatagtaaatagaagagtatggaatgaattagtgacaattttaaaaagtcattatgtaaaaaaacacgaactataattattgatgaataagtgttgatataaaaatctttttaagtaaaaacagactctgaaaatagagtctgttttttagtatggtttcttatgctttatttacgtttgtcgcttgtggtccacgttgtccctcttcgatatcaaaagtcacttcttgcccttcatccaaggatttaaagccttcaccttgaatagctgagaagtgaacaaatacatcttctccaccttcgcgctcaataaatccaaaacctttgtcagcattaaaccatttcactttaccatgttccattttttgttgcctcctaaaatgtagaaaataaaccagattatcattaaatctagcttatttatatattatcccaatggagacatcttaaacttaaattaatttgatctttttaactttctttatcatcactcattccattaaaatgtaacaagtgtatggctataacatcatagtgaggttctcgtgcaaaaacttcaaataaacatggaaatgatagaagtcgagtattagccactgttcacccaatcattaagggcattgcattcataaatatgaacctcaattagatacgagagcataatgggagctgtctgtccaaaagaaagggaagttcactcaaaaaatttttgaatagtggtgtaaaaatacattcgattagatagaaatctatatacctttttcatataaatacaaccttcgcactacaatcaataaacttgtttccaaataaaaaatgacgccgttggaggcgccattttttataggatagagaaggacacaccctatgcacgggcggtactcttaacacatcgtcttgatttgataatacccagcgtttaaatttactaaacctttggttatgatgctttatgcagaatatctacgtttacctattaaaattatttattaaatttctttggaaactgcttcacaactcccgcagatatagtatctgccattaagataatatgtgatactccttcatcaattgcaacgattctcgcctcccaatctctttctaagcttgcagataaatcatttgtcactaattttaaatgcatatacagtaattttttcaaatcttcattttttaaataagggttggcctggctaaggaacgctgctatatcatcagcatttctataccattcttggtttaattgattcaccaaggctttctttcccgttttagccgcatctacaatcttgccagcaatcacaatatgttccttgagcaaatccgtaagtttattcccagctttttctccgtatatcggcttcacagcattcccgatatcttcttgattttttaataaccttgtcaacacttgtttttggtcttctgatcctgctgttgttgcacttgtaatataattgcttgtccacagtacatgatccatccaaagtcttctgaattcattttcaaactttacctgagattgactaacacgatgttcttgtgtttcagcacgagcactacttggttcaactagcatgtttagcgaaaataacaacataaatcccatcaataataatcttttcataaaaacgctccctccaatttaaacgagtatgcgccttattatttgtatatgggatttttcacattcctcaaaatgttacattctaatagtgattttttatagggtatctccatactttcaatcagccaacatagaggaagggggagagaggatacctttttgtaaggttagagcagaaaaaataaagctttttttgttcactaacaaagaaacaatcattgaggtctaatttccttccaagttttttgactcattcaattatttatacattctctaaaaaatgtctttaacataagaacctaatggcaacactataaacaatagttagtgaataggatttctttgcataaatttggggttttttccagatgaaactcaaaaaatgagataaagattaatgagctattcctttcacataagcttgtcagaatactatctagagagaggtcgaacaatatgaaagtgacggatacacttgttcaatgtttagaaaatgagggagttgaatatattttcggaatacccggtaaagagaccttggactttattgattccttatccaactctaaacagattcaattcgtgaatgtgaggcatgagcaaggagctgcttttatggcagatgtatacggaaggttaacaaacaaagtaggggtatgtttatcaacattaggccctggagctactaatttattgacaggtatatctagtgcaaagctagaccattctcctgttgttgctttaacaggacaggctgctttgggaaggcagcataaagattcgcatcagtatatggacattatcaaaatggtggaaccggcaacgaagtggggtgttcagataaaagatgcacaaacgattcctgagattattcgaaaagcatttaaaattgcacaaatggaaaagccaggacccgtagtagtagaattgccagaagacttagcaactcaaatcgttcccattaaacctatttcacttacatctatacccgtaagtatacctataatggagtccattcaggctgccaatactcttattgagcagtatgagagaccttttgttattatcggtaacggcgctattagacaggaagccgtggatgagcttcaacgatttattgaacgccttcaatcaccggttacccatagttatatggctaaaggtgtactgtctaaagatcatccacaaaatttctttacgtttggatttaatgaaaaagatgaagtgctcgcaggcttaaaggaagctgatctacttattgtaattgggtttgatcttgtcgaaaggttacccaaagaatggaacacagaaaaaacaccaattttacatatagatactttaccggcagaagtagatgaatattaccctatagaggtcgaattggttggagatataaagcagactttacgagtattcaatcagcttgatattccttctaaaccatggattccctctggtaatctccagaaacaaattaagcaatcttatcacattgaagagaaaaagatagatagcgatttgctgcctttgacaatcgagaatatcttgcatattattgacaagctctcttcagagaaaacaattgtgatttcagatgtgggagctcataaagtatctatagcccgaacttatcaacctaaaaaccctaacaggctcattatatcaaatggtctagctgccatgggtattgctctaccaggctcaattggagctaagttagcctgccctaatgatccagctatttgtattactggagatggaggagttttaatgaattttgctgaaatagagacggcaaagcgcttagggctttcattcatcattattgttttaaacgactctacattaaaaatagagcaggaaatgatgaacaaaaagtttggtaagagctatggaataacttttacaaacccagattttgttcaactggcaaaaagctttggaattaaaggcgaacaggcaaatagtttagttggatttgaaaatataatgaaaagagccttacaaagtttagatgagattgtcctaattgacgttcttctaaaaagctgattgcgatttctccattattttaacgagttatctttgttaagggattaatttgtagattcactaggaaataaatgtttttaattttttgaaataagctaagctgagttcaacccaaatccaactataaaggaaagtaaatacaaaaattaaaccagtagtagaaagagaaaaatttttagaaatcacgggacctagtactgggaatttgaaaccgtacaatagggtaataatcccaacagttaatagagtggccccacttataataatgtacaatctctttttaaaaaagtaaaaagcggctcctatgcccattcccaatattcctgttgtaaaaggaaaaataataagttcacttggctggataatcagaagaagcagatttgttagtatataggtaataaaccctagagggagcgaaagtataaaacaaaaaagaatgggtgcagtagagaatggactaataaaaactcctattcctggtaagaaacctcctgctgattgaaaaagggctgctaagctggcgaaaagagcgcctgagacaagctgcttagttttagatagtctattaaaaaaaagctgcgcagattttacttcacttgaaagagactttaaaaagtacatgaatttcacctcggttaactgtttttacattataaggggttaaagagagatttagatcattgcctgatatatcaactcttacatgtaatatataaagaaattaagcgggaggactaataagtcgcatttacttttaaaggaataggccatatccgttaagataaatttctttatctttctaaaggtatgtactgtagcccataaaatgaatcttttatgggctttattgattaaaggcttttttattttcttgaaagttcatttgttcattcctacaaaatagctggtaaaaaaattaagctacaatttttaggagaaaatcaatacccactcgaattttataaatataaatcatggaacaatttcaaaaacagtaccttgattaaagtcagacactttcatagagccataaactcctaaataaagcttggtttgatccaggttcgttcccaaactaacgtagtaagctgattgggaaccaaaattataatcaacttccacaacactaaaatcatttagcttacaatctgtacctgctctggtataagctaaaactcctctaattggggattgagattctttaacctgtgcaatatccgtaaacataacgcttcctgttaagctagagattttattccccatatatggctgaactcctgtaagggaggtccctccaaatttattggggcggggatctttgtgaaaataacttgttaaaggctgaatacgtctcactgaagtttttaccgcttcattgtaataagcaattattttctcatccaaggccggattttcagaacacctttttataaacgaagtcggaaaatctccttcccatccccgccagccaaggttaataaatccttcttggctgggtttggctctcattaaagaagcttgaacaagttgaggaacaggtattggcttataatgaacaaatgaaaaaatcgactctactacgtcttgtccaacatttcccacatatttgatgtactgattataaaatttttgaaatgaaatacccgttatattgcgaacacccttagcaatgagcgtaagagtttcctgaataggtgaggggagttcactaaaacgtgtgactacgggtggattatggataaatgtattcttacctacatcaatttcaattattttcccgtaaatttctatatcatcctgacttaagttaaaggggtcatagcctgatccaccatctccggttgtaaagataagttttccagtttcaggtgaaaagtttaagctgttgacaccattatgattaaaaaatggtcttcttaagttaagtaacgtccgtcttttttgaggctgagcatttggttggaaaacccattcttccactgtatcaatatgatcatatttagtttctctatttatccaccttaagtttgaagttttaggatcacacgggttaggcctataatgttcggaaagtgcacctgggccttgtgttccagctgctgagtaatgaagataaaacagaccattataataaaattctggatgaaacgctagccctagcaatcctcgttcatcatatcctccgcgggaaacacctggttcagacgtacctaattttatgattcgtgagcgaatatctaaaaaagtctgtatagcttcgtctcttatgtaaaagatctctcctacttgggttgcaataaataaactttcaaatgagtcaccaggaagtatagctgttttcaacacagtaggtaaatttattttactaacaataggccgtaaactaaccttagcttttatcaactaacttgacactcctttttaatggtttcttttataagaatatgattgtaactgttctattagtatcaatactattttataaagttaggcaatttaatggaatttgtgctttctataaatagaaataaaggaaaaacaatgattaattcaaaaaaatagtgatattattttatgaattggaaaagaatatggcttataaaaggagtgaatgcaaatgtctgtgaaaaactggttaatgggattagtcgttttgtttacgatggttatcagtgtgatgacttcaggattactcggtgttttggctgaatccgacgcggtaagacagaaagccatggaggttcagttgaacgatgatttctttaatccagaaaccatcactatcccgagtggaaaaacgacaacattgatattaaaaaatgaaggtcagaaagagcataccttcacagtagaaaagctcggaattgacgctgaagtccagcctggaaaagaaaaaaccattaccgtaaaaccacaaaatcctggtacatatgaactgatatgtaggtatcattttaatagtggaatggtggggaaagtaatagtcaaataacaagcagggccaatcggtctctgctttttgaattgaatataacatactttcttaattaacataatagattttaaaggtataaataaatcgttcacaatttcaaaaaagtaataaatatttatttcaaatatatactaaatgaagaaaaagcacaggaaagtatagaataaaaacagcatttatatccaggttattaaaaaatgtatccttaatgagcaatgagcattgtttaattaaaaggaggaattttatatggtcgataatcaatcaaataatttagaacaggtatcagagaacaatacagatgaaaccaaattaggtgatcttgagaaagagtttgtaacaaagcctgctaagtcgtcttctgatccttatccgcataaatattatactggagacatttctatggtttctaatgctgtgccacgaaacgataaagaataaaagtttctcttatatattaatatataagagaaactttagaccatttaagcttaagcatatatgagtaggctacgaaatgtttatatacctgtaaatgggggatttaccatataagaacattgatacttaattggaaggagaatgaaaaatgaacaataatactgaaactgttgaaaataaagtagaggataaactaaatgaaatgagtcaagagaagaaagacaacatcctttctagttttaacgaatttaaaagttacttaggagataaagtcacaaaaggtgagaaactagggttaaatgataatcaattagctctagcagctaaaaaaatagctgactatctcgcagcacatgaggaaccacaaaatgaagagcaatacttgttacatgagttatggaaagttggaaacgaggaagaacaacatcatcttgctcatatgcttgttaaattagtcaaagaataatctaaatcaattatagattgctttttgccattatttattagggggtcaagcgtattcaatcaacgtagcaaagagccacttgcgtaaaacaagtggctctttataatggttaggtgtcaggtaatatcgttgcaaaagtaagaataagccgaaatcgaaatatgttatctgaaaactcttctattgtcaacttaataaaaatgcataactacagaaaagaaataagggtcggttattttcttctctttttattcattttctttagaatcttcttgataatgctcatttaagtatgggttctctgtcgtagcaaaattaacagattgaaggctagtttcaggatccattccataatagccttttagtttcgcattttctagctcgccacttctaagttttggttcttttttctctttcatgctgcacctcttttttcttataaataaagcttacagaaatatggtatcagttattgggttctatttggagatggaagaaaagaatgtaaaaaactacattctttctttccgactttttatttttcttctaaatcaaggactggaaccatacggtcttcatcatgtgttcctctcgcatgaacggtagctatacttgatgtttcatctacacttttaatccaaataggaactccgtggtaatgaacatcaatttccttgggggaagaaagaatttgtttagctcgatttatttccatgttatcacctcattttttagtatgtccttgtgatgcatcaattaaaagataaagctatatttcctcaccaataacttgactacattctataactcacttcgtcaaaaattaatctattctttaaccttacaaaaatcgaacatcaatgggtttgcttaacctcattttattctttaattcgaatacgtataaatatgaaaaatgagcacatactgtacctaatcagattcctccttttgctgacgaatcgtttctcctttaatatgttaagtttacaaaaaacatctgtcttcacaggtgttttttattttgagaaaatatattatttgtatacaaactaagttttattttacttctagtaggggaataaaatagtaaattaaatcggagaggatgagggatttatgatagagatggaggtaaagaaccttcaaaggtcagaaactaaatttagaaaggctgagtcagaatacttaaataaggcaatcgaagaatatttcgttcgtcgtacataccataatgcaccagtagttgatgcacttcgatatgtactaacgattgataataaaagggaacgtttagaaagtgccgttgaactttttggagataatatcaaagaagtaaataaccaagatattataaactatttaaatcaatgtagatgttataaggaaataagagatacagtctaaatttgatgctatcttatgaaaaaatttatagttcataaataaccaaaagaggattggagatatgaactataaacaaaaggattattatattagcgcaaaagaaaatgaatattataaagtactaaatgtagtcgattggatttgagtcaataatccggaggcattctctcaaaaataagggtaaggacttaattacatggtgtccataaaattatacttaaatgattcttgcgtgaaaggaaatttactgttatattaaattcaattaaatattttcttatttcaatattttttgaagtgaggatagaggtgcaaagatcataagtatacaatttgaggagaatgagatccaatgacaattgtggaaaggggtatttgccgaagctgaaagaatctcatgttcttgaagctggttctgctgttgaataaatacagaactgtcatatgggaaactgtatggagggctatcttacgcacggaaactatttttgataaatattgtttctactgcagcaacgaatccctcgttgctgcttttttgcgtttcttatgaatggctctgacccctctaattttaaaaattttataaagggtgtgtagttatgaattttggccaagtattaacagcaatggttaccccgtttgatcagaatggcgaaattgactttaacgcgacgaaaacgttggttgagcatttaattacaaatggcacagacggcttagttgtagctggtacaactggagagtctccaacattaaccacagaagaaaaaattgaattattcaaatgtgttgtagaagctgctgctggaagagtccacgtcatcgctggaactggctcaaacaacacgcaagcttcgatgagcttaacgaaacttgcagaggaaacaggagtcgatggtattatgctcgttgctccatactataataagccgtctcaagaaggcttgtaccagcattttaaaacgattgccgaatcaacctctctaccagttatgctttataatatcccagggcgaagcatagttaacatttctgttgaaacagttgttcgtctatcagagatcactaatgttgtgtcaattaaggaagcaagtggcaacttggatgccatggcagagattattagcaaaacacctagcgactttacactatacagcggcgatgatgggttaacaataccagtattagcaattggcggggcaggagttatttcagttgcttcccacatcattggcaatgatatgcaagaaatgattaatgccttcaaaaatggcgatgtccaaaaagctgctgctacacatcgcaatctgcttccaattatgagagcattatttattgcgccaagtccttcaccagtaaaagctgcattaaatctaaatggaatacaagttggcggtgttcgtttgccaatggttcctttaagcaataaagagcaaagtgcactagaaaaagttctgcaagctagcggcattaacgctacctgttgaaataaataaaaacaggttaggagagagagcatagctaaaacgaccgattcaatcgatacattaaggcaagattggtacccaaagctcaagatggatgaatcatcatttagctaacttctaaaaatagaaaaactcccttaacgcattgggggagtttttctgtttttttatgtatgtatactatatacatcttcagttgccatccagagggagacctatttcactatatgttcattcttctgtcggtattggtgcaagaacttatatcttagtcaacacgattccgcatagagtaagaataattcctattaattgatattttttaagtctctctttaaagataattaagctcccaattaaaacaacaatacaatttaaactaatgattggataaaccacactggatggaccttcctttagggcgaataaataacagctgtaaccaatcgtacttaatataccaactagtatacctatctttatttcaattttatgtgcagttaattttttaaattctttccgagctaataaacttaaatagacagctcctccgccatacattgaaacaagcatttcacccatactaaagtgctgatacgtgctgaatttcataataacaccaactgtgccgatagatagaagagctaaacagcagctcaaaatccataatttatactctatgtgtgccgttttgtttggttgatactgaataatacaagctgccaatataataatgacgataccaatccaatttgttaaaggaatggattgaggaaataataaggatgtagctataacaacaatgactgtattcatcgcaataatggtagatgtaatactcgcaggtcctttctcaaaggctttcgacatttggatattgccattggcatttaagataccgattagtgcccccgttaaaataggtaaaatgtgaaattcaaaacttcctttaataatagtaaataataagaggataaaaaaagaaatccaataaaagaaaagttgaatacacactttagataaatgttgaagggcaccccatttaaataaagtattgtttactccgaagcatacagctgtccctaaagcagatataaaccataacatagtgtgtaattccttcctagtagtttttatactactaaattatacaatttatataatagttttaatatttcaatttaatgaaaaatagcttcggataactcttttgtaaaagtataaagatgagaagtataaatttattacgaacctaagggctgtgctcttttattaaaacctcgttccctatcattcttacacctttttactgtccaataaaatgcgatgaatttttcaaatccattcaccattttcttctcattaaaacctaaagctttgtatcctaaaactcaaatggacgttttagaagatgaggtgcgggaatcaagtgaagtaagacaatgattaaataaaggaggagttgctatgaatataacagaagtgatgacttctaatattgagacaggtaaccttaaaagttcatgtggtgagatagctaatatgatgaagaatgtagatgtaggagttattccaatttgtgaagatgataagctaataggcctaataacggatcgtgatttagtcgtcaagggattagctaataattttaatacgaatacacaaatatctgaaatgatcaatactgatgtcattaccggtacaaaatacatgtctgtagagcaggcttcagatctcatgtctcagcatcaaatacgcagacttcctattgtagaaaacggaaaactcattggaatgctttctttgggagatttagcggtaagtaatacttcaaataaagaaacaggaaaagttcttgagaatatttcagctcctgctgaatttaataaataaacaagcaacagattttatttataaatagtttcttttttagtttttaaaataagtatgaagaaggagtggacatgactcctgtcaatagaaagtaataaacgagccttttttgtacttcatgctataggtaagggtaagccaatgaaaattagcttgcccttaatttatacatgacaaagattaattgtaaatttaccccttctagtctcgttgctatgtttgcagtgaaaaagctattttaaattggaaataatactattaaattgcaatcgctctcagcttattatagattaaagatatcgaaacgtttcgcctggaggtttttaaatggctacaatgaaggatatatctaaaaaagctaatgtttccctttctaccgtgtcagctgtaattaatcaatcagcatatgtcagtccggcacttaccaatagagtgatgcaggcaattaaagaattaaattataaaccaaatgcagtagcacgaagcttgaaaaaaaagagaactaacacggttggtgtcatagtttcaaatctttcaaatcccttttatcccccattgatcgaaggtatagaagatgtatcgtttaataataatttcaatgtaatcctgtgtaatgtatcaaatggacataaaaagattttgacttatttagaactaatgctggaaaagcaggttgacggtctcttattagctaatattgctaattcggaggatctaaatgaagttgaaaaatcaggattaaaatatgttttaatcaatagaaaaccctcattttatgataaaaattttgtcggagttaataatccactctcttctgagctagcagttaatcatttagtaagacaaggctataaaagaatcgcttttttgggaggtgatttgggaatcaatactgcgagagaaagaaaagcaggatttatgagttgcatgactctaaatggattggatattgatccaatgcttatctttgatggagaatattccttagaatcaggatataccaatgtaaaaaagatgattgagcaagtggaagtattaccagaggccatttgtactgcaagtgacataatagctttcggagtgataaagggactaagagattctggtattcgtgttccagaggacatttcagttattggaaatgataacaattccttttctgaaaatttccttgttcctttgtccagtattgaccattctacatatgatatgggtaaaatatccatggagtttctattggaaatgatcaaagaaaaagatgaaactcgggctagacaaatcatacttaccccatctttagtagtacgcgaaagctgtggatataaaaaaaataagattgataaactttattaaatcaactttagggtaacaatataagaaagttaaaggggttaaattaatttaatgtcattgatactaagaagtaaaaacacaggcatcattgaaaagctaaaaattgtttttcaaaaacgtattcacatatttgatggacgcgtctctataacagccgttatagagacgcgtctttaatttgtcttaatatttaacagcttgcttattaattttttctttgtaaaggagtatcgtagagtcaaaccacagaatatcaatcaatactaacgtatgcattcatctttttatggttattaaaccatttaatagtcctggttcttttaatattttgtgggtgtgataccgaagaatttcatgctaattttcttgtttttatagattctaagactctgaatgttgtctaagtattagtatgtaatataagtaactaaattgttaaacaaatatagagtatcatcgcacgtaactgcttattatttcgatagtagggggtagatcaccaataatattctgaatttctttagaaagttcttgattttgcaaacgctaacaaattataataagtattgacgaaacgtttcgctaatatatttatnnnnnnnnnnnnnnnnnnnnnnnnnnnnnnnnnnnnnnnnnnnnnnnnnnnnnnnnnnnnnnnnnnnnnnnnnnnnnnnnnnnnnnnnnnnnnnnnnnnnttttttattatttatgtgacttttatgttgtgttttcatcgaaacgtttcgctaaaacaccagtaatgttaaacaaatggaggggtttttttggaaaaattaattattactgttgctccaactggagctcagacaactcgcaaacatactccttatgtaccttttactccaaaggaaattgccgattctgtttatgaagcgtggcaagcaggggcgtctatagcccatattcacgtaagagatgaagacggaaataattctcttgatttaggtacctatgtagaagtcgttaatcgcataaaggataaatgcgatattattattaacttaacgacagctggtggagtggccatgaacgatgaagatcgtcttcgagtatgtgaattaggatctgagttggcaacttttgatgctggttcaatgaattttggtagtgatgtatttcttaattcacctaattttctggagcgcttggcaaaaaaaatgaaggagtatgagataaagcctgagattgaaatattcgatgtcggtatgattgataataccttgcgaattgctaaaaagggcttcatcgactccccctttcattttcagtttgttttaggtataaggggagggatggcagctacacccaagaatttattatttttagctgaaagtattcctgccggttcaacttggtcggcaattggagcaagtaaagatcaattagctatcaacacaatgagtattataatggggggacatgttcgcgtaggaatggaggacagtgtctattatcgacagggtgaattggcgaaaaccaacgctcaatttgtagaaagaattgtaggtttatctcaaactttaggaagagatgtcgctactccgaaccaagctagagaaattttaggtttggataattcaaagcgcttgaagggattaagtagcattggtaaataatctaggaaatcttggctgctctttgcttttccaagcatcaatccggtcagattcttttaattctccttaaaatgagtaaaaggagaggatgagcacctctgaataaagtaatattgtagattgaataatttcgacccatcgtgtgggatcgaagaagacacaaaaaaggcattaaaagagagcattataattattctgaaactttaaattttaatagcctttttatttatttatcaattttagtagaagaaaatgcacttaataaacttgagttcattcaataaattaatcattctccagggaggaatacatatgagaattgcaataatgggttcaggttccttaggaactataataggagccttaattactgcaggaggacaaaaagtagatttaatcgatatcaataaggaacatgtatccgcgctcaatcattccggtgcaaagattactggctttatggatctttgcgttcctgtaaaggccatgttaccccatgaaattactggtcaatatgatttagtttttttattaactaaacaggtttacaatcaggcttctttagaacaattgcttccgcatcttcactctactagtatcgtctgtacgttgcaaaatggtatacctgaggacttcgttgctgcttatattggacatgaaagaaccattggtggtgttgtaggatttggtgctacctggcttggtccaggtgtatccgaacttgcaacagaaactcgaattttaaaaaaatatgcgtttgatattggtgaattagatggatcaataactcctcgactcaaggaagtaaaaagaattttagatttagttggtcattgtgatatctcttctaacatcatgggaataaaatgggcaaaattattaatgaatgcaacatttagtggcatgtcagctgcattaggctgttgttttgggaaggttttagccagtgatccagcaatggttagcttagcctacattgcagacgaaactataaaggttgcccatgcttatggaattaaattagagaggattcaaggaaaagatatgaaggttcttgaacttcaagatgaaaatgatatatctaataaaatggatttttatcaagaggtttggggaccacatagtaatacaaaagcgagcatgttacaagacttggaaaagaaaagaaaaactgaaattgactttatcaacggttttatttgtagaaaggggagggaggcaggaataaaaactccttataatgatttagttgtcaaattagtgaaggaagctgaaaaaaaaggtagttctccaagatttacagataatataaagcactttaatcccaatttattaagtatgcgtaaaatgagcttcaaagaatagcgtgctatatagtctgaagtaaagcctccacggatttacagaatagggaagaggagcaaccaataaatagattgtgtattctatgggactttaaataatagatgttagatcacttataggcttctgaaaatttcgtaaacggtccttttttcatacgttttatattgtaaaaactaactatttattaaaaataaggaggattgtatggatcttattgttattcttttatctttaggactgcttatgtttattgcttatcgagggttttcagtaattctttttgcgccgctttgtgcgttgtttgcagtcttgttgactgagccatcatacgtactccctttcttttctaatattttcatggaaaagatggttggttttgttaagttatattttccggtgttccttttaggagctatatttggaaaaatagttgaaatgtctggagtggcaaaatctattgctcaaactataatcagttgggtgggacctaaacgagcaattttagctactgtactactaagtgcaatactgacttatagtggtgtaagtttgtttgttgttgcctttgctgtttacccgtttgcttccaacatatttcgtgaatcaaatattcccaaacgcctgctccccgcaactattattttagggggcgcaacatttacgatggatgccttacctggaacgccacaaatacaaaatgtaattcctactaccttttttaagacagatatttacgctgctccaatgctagggataattggtggggttattgttttttctgttggaatgatttatttagaatcacgttctcgaaaggctcgcaaagctggagaaggatattcaggttttgaaggtaatgaagtagaaatggcagccactatccaggctgaagaggagaattattcaataaacctcaagacttcaaacagccgttctcgtgaacttcttgcatttgtcccactaattcttgttggggtcactaataaatttttcactacgattattcctaagtggtatccaaacggatttgatttctcttccatcggcctagattcttttgggaaggtcgaactttcccaggttactggaatttggtcagtagaacttgccttattatttggaataatttctacgatattatataactggagagaagtacaatccaaatttaaagaagggataaatattagcattggtggagctttactagcaaccatgaatacagcctccgaatatggatttggcggtattattgctgcacttcctggctttagcgttgttcgagatggtgtttcgcatatatttacgaatccacttgtcaacggagccgtaacaactaatgttttggcgggaattaccggatcagcttccggaggaatggggattgcactaagcgtgatgggtgaaaagtatatggaggcggcagcccaatataacattcctccagaagtcatgcaccgggtaattgcaatggcttccggagggatggattcactaccccataatggagcagtcattacgatccttaccgtttgtggtttgacacatgttcaatcgtatcgtgatatttttgctatcactattttgaaaacgttaactgtccttataatcattggaatctatagtttaactggcatcgtttaatattttatttattagtacgtttaagatagtataaataggaatgttattttgtattaagaggctcattagctttctgtccaaaagtttcatgaacaaaaaaactactgataccttggggtcactcccctggtgagtcagtagtcttttctgttttagattgtatgtagtactattcttagtcaccagaattatgattagaataagtaaaaagcccctaaaactaataaggacttttatatttcgtattatttgacggcttctttttctaccaatcatccgcattatataaactgactttgtatgtgctatacatactttagtggtgaatgtttttactgaattttctttttacagactcagctatagatataattagtagggagataagtgatgagataaaagcagtaaagctaattgttcctactctcataccaatccatcctccgataaggaaacttaagataacaatgccaacactaaccactcctacaactagaggtgctatatatttaatagtaggtttttttctgctgagtgcatatgaaagtacaattaaaccagcaattataattgtagaaactatctgtaagtcacccattattaacagcctttaaattcaagatatccatactagtatattctcctaatgaagtatcaaataacaccttgctcaatcatagcatcagcaacttttataaatccggcaatgtttgcacctacgacaagattaccaggagcgttgtattcttgagcagctttcttgctaatttggtatatacttttcataatcgcatgtaatttactatcgacttcttcaaaagtccaagaaagcctagtactattttgagccatttctaatgctgatacagaaacaccaccagcatttgctgctttagcaggggcaaataaaatattgttctctaagaaaatctcgacagcttctaatgtagatggcatatttgcaccttcaccaattgcttttactccattggaaactaataattctgcagagttttgatcgatttcattttgagtagcacatggtaaagcaatatcacatggtactgtccaaatcccattacaactttccacgtaaaccgcttcgggataatcatttacataagtacttatgcgtttcttttctacttccttaatccgtttaactgtctctaagttaagaccatctttgacatagatataaccattcgaatcgctgcacgcgaccactttagcccctagctgcatcgctttttcaattgcataaattgagacatttcctgaccctgacacaacaactgtactgcctttaaagctgagattattatcttttaacatttcttcaacaaagtaaactgttccatatccagttgcttctttacgagctaaacttccaccataactaaggccttttcctgttagaacgcctgcttcaaaggtgctacgcatttttttatattgcccaaacaaaaagccaatttctttacttcctacaccaatatcacccgcaggaacatccgtatcaggtccgatatatttgctaagttctagcataaagctttgacaaaaacgcattatttctccatctgattttcctttaggatcaaaatcagcaccgcctttaccgccgccaattggttgaccagttaaagagtttttaaaaatttgctcaaatcctaaaaatttaataatacttgcgttgacagatgggtgaaatcttaatccgcctttatatggaccaatcgcgctactatattggacgcgaaaccctcgattcactctaacatttcccatatcatcgacccaaggtacacgaaaagagatgactctctcaggttcaacgattctctccagaatagcttggttaatatactgagggtttttaataagaacaggtattaaagaatcgaatacttctttgactgcctgatgaaactcactttcacttggatttcgtttttttactgtttcaaatacttgattaacataattctgcacgctttctgtattcgccgattgatttttttcaattgttatcatacttatccgtctcctatttactaatttataatgaaaatttaaaaaactcgtcgtaatttttagggttgttagtataaaatattttataattgaaataatgatcgaatcaatataaagaaacgataatatcaatgcgttttatgcattaactaataaggaggatataaaatggactttagacaaatccgttattttatggaggttgctacacgcgaacacgtaactgaagccgctcattctttacatgtagcacaatcctcggtaagtcgacaaatagtaaatttagaaaatgaattagaagttgatttgtttatcagagaaggaaggagggtacatttaacgccaattggaaaaatattttttgaacgaatgaaacatgccatgaatgtgatagacgatgcgagacgtgaggttaaggaatatttagatcctgaaaaaggaacaatacgcattacttttccaataagtttagcagcgtatacgttaccaactgtaatctatgcatttagattgcgctatccggaagcaaaatttcagttaaaacaagcgctttacctggaattaattgaaggtgtgattaaaggagattttaaccttggcctgataggtccacttcctcttaaagaaaaaaaacttcaacaaaaagttttatttacggaaaatattgtggctcttttgccaattcaccaccgccttgcaaaagaatcctccgtaaaacttcaagaactagtagacgaaccgtttgttttattacctgagggttttgtctttcgagatattgttgtgaatgcttgtcagaatcttggcttcacaccaaatgttgcctttgagggggatgatatcgatgcgttgaaagggttagtttctgctggtttaggtgtaacactcatgccagaagtcacgctagtcgatagcttgccgcgctcaacagttaaaataccactggttgaaccaaacgtaacaaggactgtaggcgttattaccccaaaggaacgagcactacttccaacagaaaagttattttatgatttcctacaggaatttttcactagattagatgattttaagagctgatttatactcaagaaaaagcacgtgattagcagagaaaagtgatatattacattttttgttacctggatccctttttggggaatataaacaaaaaagaatcccttgaaaacaagggatttaagaaaggctacgattacgaattatgcagcttttatacatatgcttatctttataataaatcgcttttatgaaaaaatatgttgtaatttacttactaacacacatttcatatctagttttataaaaagctgcctctcctgactcctgacgctccgaggcagctttttatctcgttaacatattaacaatagctgttcagtcaacgttactttggtttgtataacagtttttaaatacttaagtcttttgattttttcttaaatctcaaggggtttttctttaaaaagggcaagcattccgtccggaaaagttactttcacagatagataacaatattgaaaataaagttttcaatattacattgacaagaatgcgaatcctgcttacaattgaaaacgattatcaacatcaagtaggaggagacaccgttatgtctaaggggaaaattagtctgaaaattaagttaacatttgtgtttattttaattttgtcaacattattagttggttgttcaaataataataatggggaatcaacatcgaaaggcagtcatgataatatgcttacgattgcttggccaagagatgtaggggaaatgaatccacatgtctacaacccttcacaattatttgctcaatctatggtgtatgaaccattagtaagctatcaagctggcggtaagataaaatcaagtctagctaagtcatgggaaatctctgaggacggtaaagtatacacgtttcatttgcgtgaaggtgtaaaattttctgatgggacagattttaatgcagaaattgttaaaaagaattttgatactattttgaataatgctaaattacatagttggttaggtttcattacgaaagtatctcaaacagaagtagtggataaaaatacttttaaattaacgttgactgaaccatattacccaacaattcaggagctagctgtagttcgaccagttcgctttttaggtgaagctggttttcctaaagatggtgatacttcaaaagggattgttaaacccgtaggtacaggtccatggattttagaaaagtataaagctgacgaatatgctatttacaaacgcaatgaaaattattggggagagcttccaaaagtagcaaaaatcaaagtgaaagttattccggatgcggaaacgagagtgctggcatttgaaaaaggtgacttggacatgatttatggagaaggagttatcagtctagatacgtttaaacaattaaagtctactggaaaatatgaaactagcgtttctgaaccgattgcaacaagacagcttgttatgaatacaaaaacagaacagctttcagatgaacgtgtacgtgaagcgctgcattatggttttaataaagatgcaatggttgaaggagttacttcaggtttagaagaggaagcagaccatatcttacctgcaaatctaccttatactaacgatattgatgttaagtcagtaggctatgatgtagaaaaagcaaaggcactattggacaaagcaggatggaaacttcctaaaggaaaaacggttcgtgaaaaagatggaaaattgcttgaaattgagctaatgtatgattcagcagaatccattcaaaaggcaatggcagaaactctccaatctgaatgggcggcaattggtgtgaaattaaacattgtgggcgttgaattagcagaccaagttcaaagatttaaagataataaatttgatattaatttctttagtaactatggagctccttatgatcctcatacatttttaaacattgtcgcatcaaaaggatatggatttaatgaagctatttcagcatatccaaataaagatgagttaatcaaacaaatggtgaaggttcctcaaacaacagatgaaaaagaacgtcaacagctttatgcgtctattttaaagtcgctacaagatcaaggagctattattcctgtttcttatattaagaaaacagccatttatcaaaaaaacgtaacaaactttaagttccctgctaatcgtgacgagaatccattcacaggaattagcatcaaacagtaaatagcaggaggttttcatgggcaattatatactaaaacgaattatgtccatcattccagtttttcttttggctgcacttctcacgactggcatgattcatctttcaccggtggatccagctgaagcttatttaacagcagcacacatccagccgactgatgagatcttggctcaaaaaagacatgagtttggtttagatcagccattctttattcaatatgtaaactctattatgaagatatgccaacttgattttggcatatcttatgtttcaaataagcccgtttggaatgaagttatatatcgaataccagctaccgttcaactagccatagcgagtatattaatagcggtgtttgtcagcgtgcctcttgggtttctcgcaggagtaaagaaaggcagcgttattgatcattttagccgtttactctccttttttggtgcgtctattccaactttttggctaggctacatactggtttttttcttttctgttaagcttaatctttttccagtagagggaatcggaacatggcagcatcttgtactgccttccattacgctagctcttcctttaatagcaatgtatacaagattgttacgtgcgagtgttcttgaaaacttgcaacaaccatatgtgctatttgctcgaactagaggacttaaagaaaaaacgattatgacaaaacatgtgctgagaattgctatttccccaatgataactgggcttggaatgaatcttggaaaattgcttacgggcacaattatcgttgaatcggttttttcttggcctggatttgggcgttatttcattgaagctatttttaatcgtgatatacctgttatacaatgctacgtgctaatagcagccagtttgtttattttgagtaatttaattgtagatatagttcaaatgtatatagacccgcgtatttccaggaaagaaggacagcatcgatgataacaagtatacgtacgatatttaaaagtcaaaaagtaattcccatatgttcaacaatattaggtattctttttatcatcgccatattggccccttggattacaccaaatgatcccattgccgtcaatttagcttataaattgcagcctccaagctgggatttcccattaggaactgatcatttaggaagatgtaacttgtcacgtattttatatggagcacgcatctcattaggttttgctatacttattttcatttcatcgttagcaattggtttaattattggaacgttttcaggttataaaggtggttggattgatcatattttaatgagattttgcgatggtgttatggcttttccaagccttattcttgtactaggattggttggtatatttggacctggactgtcacaagtaatcttagcgctgatgcttgtacaatgggtttattacgcgagaatgttccgaggaatggtccttagtttgaaagaacagaacttcatctccgctgcgaagatcagcggttcttctcaatggaagatcattaaaaatcatattatccccaatgtgttacctccgcttgttgtaatgggtacgttggaaatgggatgggctatcatggatatatctgctatgtcttttctgggattaggcgtccagtctcctacacctgaatggggagcaatgattcacgaaggaaaatcatatattcggacgaatccagaactgatgctttatccaggtttgtctattatgcttgttattgttacattcaatctattaggcgaagcgttatcagaacgttacggtgtcaaacgtcgattttgaaaaggaatgaagaaagttgggaacagaagagtcaaaagtgttacaagttagagatttacgtgttcaaataaaaacaaaaaatggtgttgcaactcttgttcaagatataaattttgaactgaagcctggggaaattcttggtcttattggtgaaagcggttgtggtaaaaccgttacaagcatgtccattctccagctcctcaatcgtaaggaaacaacaattgaagggagcataacgctaaaaggccaagaattaaatggtttagctgagaaagaaatgcgtaaggttcgtggaaaggatatagcctttattatgcaaaacccgatgaatgcttttacgccagtttttactattggacaccaatttattgagactattcgctctcatacgcattggaataaaaaacaggcaacagagcttgccgttgagtcaatgaaacaagtgaatttacctgaccctgacaagcttttgaaatactatccttttcaactgagtgggggtatgcttcaacgattaatgattgctattgccgcaagcctgcatccagctattattattgcagatgaaccgacaaccgcgttagatgtaaacaatcagaagaatgtactacatcatttagataaaattcgttctgaatatggttcagcaattttattaatctctcacgacctaggagttatctctgaaatggcagatgaagtagccgttatgcaacatgggaaaatagtagaaaaagcaggtgtatttcagctatttgattcaccaacgcatgagtatacaaagaaactgctaaatgcaagaccagcattatatttagaagaacctgtgatcaacttaatttgatatgtaaaaagcattttataagaggtgaacaagtgagtttattacaagtaaatgaagtcactcatagctacggaaaccgaacgtttttcaaatggcaaaatcgttctaagaaagtactttctgatatctccttctctattgaagaagggacatgcttaggaatgcttggtacgagtggagccggtaaaagtactttaggaaaagtaattctcggcttggaaaagccacagcatggacaggttctttttcaaggacatgacatctatactgtagataaatatactcgccaaaaaattcggcgtgatcttcaagttgtttttcaagattcgtactcagcagttaatccccgaatgacggctgaacgtattattgcagaaccgttagaaaactatgaaaaattaacattggctgaacaaaaacgaaccgtgattgagttattagaaagagtagggcttgatgaaaaagacttaaaaaaatatccgcatcaatttagcggcggtcagctgcaaaggatcaatattgcaagggcagtctctcttaagccaaagctcattgttttagacgaatctgtaagcagtctagacatggttacgcaaactctcattttagaactattaaaggagttaaaagaagactttggtctgtcgtatttttttattacacatgatatcaaagctgcttatatgattagcgatacattaggtgtattagaaaaaggagaattaatcgaatactataattcgaaaaatcagttctttacttcaaaagatcctgtggtaaaagagatgagaggttctatacttgcagagcatccgcgttttcgttcaattagagcaagaaataatcatatctaatttaaaggtatacccatgtatttaaaggcctcgatttcatccacgtaatcgaggctattgcttttgtgtttaactcaaaatgatagaaggaggccggttggatgaatcatcgtacgtatcttactttggcgattcccctgacaatctcaacgatgactacgcccttattaggtgcggttgatactgctgttgtagggcaacttccagctccagcttatattggaggagttgcggtaggaactcttatttttaatacgttatattgggtatttggctttttaagagttagtacatccgcctttgccgcacaagcaaatggggcaagtgatccagatcagggagtacttgctttatcccggccatttttattagctgtaatagtagggctgctttttattcttttacaatggccaattgaacatgccgctctcttagtaatttctcctgatgctgatgtaagtaggtttgcagtagaatattttaggattagaatatggggagcaccttttacactgatgaactatgtaattcttggttggttaatgggaatggctaagattaaagaatctctatgtttacagatacttacaaatgttttgaatatgtttttagctattctttttgtccatgttttttcttttgatgtacaaggagtcgctacagcaaccttgattgctgaagttacagccttcatattaggagtattcattattttgaaagcatctccgtttaaatggaaaatgccatcaattcaggcacttatggatacaaattctatgaagaagatgtttaatgttaacaaggatttgtttattcgtactatttgtttactggtcgttattaatatgttcacagcaaaaggtgcttcgtttggcacagaatttctagctgcaaatgctgtattatttcaaatccactacataatggcttatttctttgatggatttgctaatgcttccagtattcttgttggtaaagcagtagggtcaaatgataaagagctatataaaaaaatacttactttatctaggcagtggtcggtaataacagcagttactatagccagtttatatgcactttttcaagagcaggttattgggctatttacaaatttgcctgatgtgatcgaactttcacttacgtatggagtatggcttatcatctatccctttgttgcttgttttggccttgtcctttatggggtttttacaggagcaactgaaattgctcccgttcgaaattctatgatttacgcgatgattgtctatatcattatacagattacagcaactcctatctggcataatcatggcctatggctggctttcatcatctatactatggggcgatcagggttcctagttatgtacactcctcaattaaataaaaaattgttacagctaaagggagaaggctgaaaaatttataacaaaatagcgccagttcattcatgagggaatccttcaaaagcggatatactaacggtgctgctactatcctaaatagataggttattaagaaagtagccagggaggacggcctcctttcttaataaaggtgtgttaaatgattagtggatttttatctaagtaaagcaagaaataagaaagccgccaagtgcttttttaagaaagctttggcttttttatacgtttccaaagtttaattctcttttacaaacaattgtccttgctctaaaaatatatagatttctactaagaaataaaaaattcgttatctgtcccgactgaataaaaaaattccattcatcatcttataataaatttctttattgaaaacagcaatacgaatctaacggattcgtattttccagtgacattcaaaatacttcccaagcaatagaaagaagaggttttgaacgtttataattaggttaaacataaggtaacaaattattttttatttattctgtatatttaaattattcgttcgtagtggtacaataaaatgatggaaagaagatatgatgcttctttcttaataaaggatgaagaaatatggatattaagactcagcaaacaaagctggcgaataatgtgggcaaattgttacgagataactttggaaaaggccctgaggctgttcatgttacgatatatgaaccttatgttgttatttatgtcagcggcttcgtatcacctatggagcaagtactgttaaaccaaaatgaagaacttcaggttatgactacaagagagctgttggtaaagactcttgaacctcaaatcactgggcaaattaaagggattacagacctcgacatacagcacttatattatgattggaacttagatcaccactccggaatttttgtgggagtgtgtctggacgatttgaaagccgatttgactgagggggacccttacccaggaaaacaagcaattcatgatcgaattataaagatgagtgagattgcccaaaaaggacctgaaaaaatttcttcatataaattaagcgatcgtacattggtcatcgtacgcgagggaatactggtggctattgaaaagcagctaatttcgttaggttttgatgacaccttacgcatctctaaacgtcctttggaaaaaggaatcttacgacaaaacgatgactatgatgaaatattaaatgcggacattcttgatatttttgtagattgggattttgaaaaggataatagtattattacacttatcttaaaaccaaaaaattaatgaggcagtaatgaattggacacactgtgccaaacataagccgaggaagcaaaggacataccttttctttttcggcttatttttgttgtctaaaaagagtaagtccttttgtaacggaataatcccctaaaacagcacctgaaaataggatgtgccaacagaaaggatttggtcgggatggctgataatcatgagattgtattgtttatgaaagagcttcatcgattgttgcaggattaccaaaagtatgacaatgaattacacaaagaagaaattagcaaggatatactacttttaagtaccattatctatggaagtaaaattggaattttaaataaaagaagaatctttaaacacaggaaatacaaagctaaacagaaaccaatctattaaagttatactagtatgcctcgtttacactttataaaaagtgaattcttattgccgaaaatgatcttatgaggaagaaggatttttcataaaacatcacgaatagtataccttatgaaactagaaactaggtgcaccatctatggataaaacgaaactggaaaaagaattaagtagctatatgggaaggttacttcgtgaaaactttggaagaggtcctggaggtgtattcaccgtcatttctcctccttttataaccgtttattttaaagcctttttattacctttagaaaagactttgttagacaagggacaagttatctatgttcaaaaaacacgtgatttgttaatggagactctaattgaagagataaaaggatatatacaattaaatatacatttagatattgaagaattttattatgattggaatttagagctgcagtctgggatgtttatcatgatccattcggataaagaaaacatagctaatcattcctataaaaatcagaaattgctgcataaagaagttgaggaagtaactcaaaaagcagaaaagttccctcacaatgtttcttcttatctattagatcagagaacacttcttataatcagggaaggtattatggtaactatagagaaagaattagttcaattaggatttgaagaaaaccttactttggctaaaagaaatctcgaaaaaaagctacttcatgaacatagtcaatcgttagaagtaattttagattcaaagataacagatatactagtagcatgggactttcataaagataaaagtacaattcttctgattttaaacccaacttcataacggcattgataagctaggcactgaactagatgtaggccaaaaagaaaggttatgtaacctttctttttggcctattgtttttttactactattaaaataaagaaagtggtgataattatgctatttcaatcggatgaaagaaaggaacttttaactgttgagatacacacggaagtggatatagtagaagcgcgtcagaaagggcgaatgttttctaactgcttaggcttcagcgcacttgatcaggcccgaattattaccactatttcagaattatccagaaatatatataaatatgccactaacggaaaaattacaatggaaataatagagaaaaaacctgaaataggactcaaaataatagctatagataaaggaccaggcattaaaaatattcaaaaagcgctagaaagtggctatacaacgtcaggagggttaggcgttggtttatcaggggtgaaaaaattaatggacgaattcaccatatcatctcaagaagaccatggcgttaacatccaggttataaaatggaaaaaaagaaataagtaaaaggaacacaagttaaactgtaaacatttatctacaacagtaggtaaagatttgtatagatttatcagtagctagactgaaaaatctatttttcattaagcactattaaggtcaaaaaattttaaaaagtttaagaaagaacggacttcctctttacaaaagactcctttattgaataggagatagcttctaaaaacatcatcccctgatgatcctgctctaggataaggttaagataagatatttcacatgcgtgagttggtaccttcagcatgtgtttctcctctattaactcttagcagtaggacaaaaatgtttcttcgtagtagtcacaagaggcttagaaacatgaaaaaaaggtgtagaaaagtatgagcaattgtatttaatcgttaaaataattgatcataatcaagcctcaaaaaccatagattcttggaaattattaataatgataattgtgatataaacagtgcaagtatataattgtgtgaaaaaaggatggatactatgccgattaattcgtttgaaaactatccgatgagctggaaaccatctgttgataaaacaagaaagcctatttaccaagccattgcaggacaattggaacaggatattatcaagggagttttattacctggaacaaaacttcctccacagagagagctagccgattatttagatttaaatttgagtacgatttcaaaagcatttaaagtgtgcgagctaaagggtttattaagtgctactgttggaagcggtacattcgtatcgtatgatgcgttatccaatgcgtatttactcgaagatataaagcctagccacttaattgaaatgggcgcgacattgccagacaatgattcatacgagccacttctccttcaactaaaagatatgctacaagagactgattacgaaaagtggtttagttatgggaggccaggtgaaagtctttggcaaaaagatgcagctgtaaagctgatgagaagaggcggattcaaaacaacagttgatcacattttatttgcaaatggaggacaaaatgcaattgctgcaatactagcgagtctttgtcagcctggagatcgcatcggggttgatcatcacacttatccaggtttaaaaacggttgcagctatgcttagtgtgcaattagtaccgataaaatcaaagaattatgaaatgagtccaactgcttttgaatatgcatgtaaaaatgacaatattaaaggcatttacttgatacccgactatcataatccaactgcttgctgtatgtccgttaaaaaccgagaaaggcttgctgtgattgcaaaaaaatataaccaatttattattgaagatgcaacgtatcatctccatcatgagcgaccaatgccagcagtggcatcatatgcaccagaacaagtcatctatattgcgagtttatcaaaatcaatagcaccagggttacgactagcatatgtagcagcacctagtcgatttaaagagcctatttcaaaggcactttataatttaaatatatcagtttcaccattattagcagagctaacagcacgtattattgtgtcaaatcaatttgaacccttagtagagaatcatcgtgaacaagctattctcagaaatcgaattgcaaatcaatatttagaaaattacacgtgtttaggtatggaaactggtatatttcgttggttactattacctgaaaagattacaggtgcagaatttgaaacattagctgcgcagcagggcgtacaagtgtatgcagcagaacgctttgtagttggaaacagttgtccagacagagctgtaagaatcgctatctgtgcaccaaaaacgattggagagcttgagcaaggattgattatccttaaacgtttacttaacgactatttataatattgtttgccatacaattataatattgtatggcttttttatccatgttatgataatccaaatctagtgagaatattttcaaaaatagaatgagttttctgaaaggaaggttatgatggtacacgaggatcatgtaaaagcttcagacaaccaatcaacttgtttacaagaatatgttaattcaccagagaaacaaaaagctttatataaacgcaccttatttgttgtaagtgtttctcaaatctttggcggtgcaggattgacagcaggagttactgtcggtgcacttattgcacaacaaatgcttggtacagatgcctatgcaggagtaccgacggctctatttactttaggatctgcaggagctgcttggttagtaggaaagctttctcaaaaaaaagggcgacgtgcaggacttacgacgggttttattctagggggagttggagcgattggtgttattttttctgccattcttaatagtatttttcttctttttttttcgctcctcgtttatggatcaggaacagctactaatctacaagcgcgttatgcaggaacagatttagccaaagcaaaacaacgggggaccgctgttagtatggccatggttttcactacatttggagccgttgcaggcccgaatttagttgatgtgatggggaattttgctctttctattggtgtcccagcacttgcaggccctttcattttagcagcagctgcatatatagtagctggtcttgtattttatattatgctgcgtccggatccgttactgattgcaagagcaatagaagagaataaacaagaacgtaacgctcaaaaaaatttaacaaatactcagcaatcaacgaacaaaaaaggagtggctgttggggccacagttatggtccttactcaaattgtaatggttgctataatgaccatgacgcctgtgcacatgagacatcatggccacgggctaactgaagtaggggttgtaattggctttcatattggttccatgtatcttccttcactatttacaggggtcttaattgataaaattggacgaacggcgatgacaattgcttcaggaattatccttcttttagctgggctggtagcagctatagcaccgagtgattcaatggttcttctagtggttgctctatcgttacttggattaggatggaacttaggtttaattagcgggacagctcaaatagtggatgctacagaaccattaacacgtgcgaaaatacaaggtactatagacgttttaattgctttagcaggagcttcaggaggagctttatcaggaatagttgtggctcaatcaagttatgccgttttatcattaagtggaggaattctatctttgatattaattccggttatcatatgggcttataggagtacaggtgaaaataaagttaaagtaggtcaaggactttaatttatctgtggtatggaagcctggctctcaaataaatgatgttactcaaatttacttgtattcttccactttcgtttaaataataaacttattggcaatcaataaatttgttacctttcttacagacgatacactaacatttcaatcacacgaaaaaccttctacctaacagagtagaaggtttttcggtttcaattattcattgaaaataggtgttgttttaagagatgtttggtgaatccccccatgtaaaactgttttaagactaagtttaatgttctcttttactcaggcaaacgtacactcgctataattgtgaaaagcaaactctcatgctagagagcttgctctttttacttcctaatatataaatcctgtttgacaaaaaacgatctttttcaagtacaccaaaaacgcacatttatgatacatagattttgagtaagttttaaaacaggaataagatatgattatgaaggaaaagaattgattataatcaattctcaaaaatcatgacttgtaatatagtcttctacatttgaataaaaaagtggttgacttttcagaataattagtattatagttatattataaaattgtttgtaataataaaaacaagttttataatataaaacaaaagggtgaaactccatgcctattattcaatcagtagatcgcgcccttcgtatccttgacctatttgatgaacatacgacagaattgaaaataacagatataagtgatcaaattggtcttcacaaaagcactgttcattcattattgaaaacgcttcaacaacgtggctacattcatcagaacctcgagaatggaaagtatggactagggatgaaactttttgaaagaggaaactatgttattcagtctttagatattagacaattagctaaaaaatatctgatggatttatcagcaaaaacaggacaaactacacatttagtcatcttagatggtaaagaaggaacgtatattgataaagttgaaggtcctatggctgttattctttattctcgaataggaaaaagaattccacttcactgttctgcagtaggaaaagctttgattgcttttaaagaaaaggatgaactagagaaaattttatctgggtatgagtatactgagcaaaccgaattcaccattacaaatgaaattgaatttttgcaggaacttgaaaaagttcaaagtcagggttatgccgtcgataatcaagagaatgaacctggtgtccgttgcattgcagcacctattagaaatcacgaaaataaggttattgccgctataagtctttcgacacttatcgcaggagtagatgacattcagttaggaatctttgttcagcaactgaaacaagcagcttccgaattatcagagcagatggggtatgggataccgatttaataaagaggttcccttctcttttgtctatattaaaaaactgagttttatattataaaacaaatggaggttatttatatgcgtattattcgatatttaagtgaagattcagaacctgttttggcagcccttacatcggaagaaacagtttaccctcttgagcaggaagggtttatagagctaattcatcaagcgaatgcacaaaagatctctcctctttcttttgttcaacatatgatttctaagtctaagcctatcccacaatctattgaagaactttcattacttgtacctattattgctcaagaagtatgggcttccggagttacttacgaacgtagccgcgatgctcgaaactatgaagctacagatggaaaattagacgctaccacattttacgacaaagtatatgacgcagaacgtccagaaattttctttaaatctacagctgctcgcacagttggacccaatcaggaagtttatattcgtagtgactctaaatggcaaatccccgaaccagaactaggtttgattattagtcaggaaggtgaaatccttggttatacaattggaaatgatatgagctgccgtgatattgagggagaaaatcctctttatctaccacaggcaaaaatgtggaagcattcttgttctattggaccagccattctcctcaccgaatccgtaaaagatccatatgactttgatatcatatgccgtatttatcgtcatggaaatcttgcagtagagggaacagctagtacacgtcaattaaaaagaaaatttgaagaattggtttcgttcttagtacgtgataatgaaatttttgatgggaccgtattattaactggcacatgtattgtaccaccaaatgactttacattattagaaggggatcagattgaaattgaaattcctagcattggtatattaaaaaatagtgtaaggttaccaagcaaaatttcggtctaattaaatgatttcaaacttaattattaaactcaaattatttttttgattttaaatatcagaaatttatgaatttattaaattttgattcagataatatggagggaaatatgatgaatataacaacagaagagaaaatgtatttaaactatattgatggagactgggtaacgggttctgtggagcaagtggatagcagtaccaatcctgctaatcgacatgatgtagtcggttatgtacagcattctgaaaaagaagatttagatcgcgctgttgcttctgctaaaaaagctcaggtttcctggaataaactgtccggggctgctcgtggtgaatatttgtataaagtagcaaatatgcttgagcagcgcctagatgaaatagcaaagacaatgacccgcgagatgggaaaaacatttccagaagcaaaaggtgaaactgcaagaggggtcgcaattcttcgctactatgcaggagaaggtctaagaaaagtgggagatgtcctaccttcaacagactctgaagcatttatgtacacaacccgtgctcctcttggggtagtgggtgttattacaccttggaatttcccagtagctattcctatttggaagattgctcctgctcttatttatggaaatactgttattttgaagccagctcgagaagcagcagttactgctgcaaaagttatggaatgttttgcagaggcaggtttgccacgtggtgtgattaatatggtaacgggttctggttctgttatcggacaaggtattattgatcatccagatattaatgggattacgtttacagggtctgatgcagtcggtaaacaagttggtttaggcgcactaaaacgtggtgcaaaatatcaattagagatgggcggaaaaaatccagttatcgttgctaacgatgccgatattgaacaagcagtagaggcaactattagtggaggattgcgttccactggacaaaaatgtacagctacaagtcgtgtaattgtacaaagtaaaatttatgatgaatttaaagaaaagctgattgaacaagtgaaagaaataaaagttggaaatggccttgaaaaagatgtttggatggggccttgtgcaagtgaagaccagcttaacacggtacttgcctacgtagaaaaaggtgttgaagaaggggcttcgttagtttatggaggtaaacgtctagttgaagggaatttggctgatggtttctatatggagcctactatattcgaaaacgtgactagtggtatgactatcgctcaagaggaaatctttggtccagtacttgcccttatgaaagttgaaacgttagaagaagcactgaatgttgcaaatgatgtaaagtttggactcagtgcttccattttcacgaaatcaattgggcgtatgctttcattcgtaaatgagatggatgctggtcttgtgcgtatcaatgcagaatctgccggggtagaattacaagcaccattcggaggaatgaaacaatctagctctcactctcgtgaacaaggtcaagctgcaattgaattctttacttctattaaaacagtatttgtaaaaccgtaactccattctttaatcattgtatgaaattaaataatgataaggaggtgcataactatcacttcgtttgttttcatctattttaattgattaggagataaacaaatgcaaattgaaactaaagagcccgtgctttctactgcaccaaaaaaaaattggagatggacggttgtaatctggttaattataggtgggtttatcaactacctagatagggcaaatctatccattgctgctccgcaaatgatgaaagatttacatttaacaaaaacagatataggacttttaggtacagttttttcctggtcttatgctttaatgcaacttcctgctggttggctaattgatcgttttggtacaaaaaagatatattcaattgcagttttgtggtggagtggagctacatttatgatgggactctttaataagctaccttcatttattattgtaaggttactactaggggctggtgaagcaccttgctggccaacaggtgcaaaaataacatcttattggtttccaaaaaaagaaagaggatttgcaacaggcctctgggattcgtcatcgaaatggggtcctgctattgctcctcctcttttagtcgcaatcatgttggcttttggatggagatcattattttatattaccggtattgcaggagtgttatttagtattgctttttggattttttataaaaaccctgaacatagcagaaaactttctaaagaagaattcgaatatattcaatcagaaggtgctggctttgaggaaaacctagtaaattcaaaaattaaatggagatcgttatttaaatacaaaactgtttggggaatgattttaggattcttctgtaccatttggatttggaatatcttcttagtcttccttcctctatatctcgttgaagtgcatggggttacgcttcaagagctaggcgtttatgcaagtatcccgtgggtgggtggaatatttggtgctatttttggagggtatcttacaaaaaaactagtagataagggcataacgtctccagttaaggcaaaacgtgcgctaattagtatctgtgctatattagctgctattgtggtgatttttgttccttttgtggatagtcttgctatgaaaataactttattcacactagcactttgttttatttccgcaattacaggaagtgcttgggctcttgctggtgatattgcccctccttctatggttgcatctgtaggcgctatacaaaactttggaggttattttggaggtgcactctcaccctttatagcaggtttaattgtagataagactggatcttactctcttgccttcatatcaggtggtattattgcaggatgtgcagcactttgttattggtttttagtgaaaaaccctattcaagagagagtagaataataaaatgactataaataatgtgatattaaggaggctaagcaaagatttataataacattgcttagcccataataactaaattcttattaggttaattaaagcatttaaaaagaaacaattctagctactacacgtatctaaagagaccctttattagaagaaagtcaattcttaacaaatagaagatatagtaatctcttattatctttttgccaaaatacaaaaaaattatatttaaacaattaagttaagtttttatatgagcttaaaaaatttgtttttattaaattttaaaaggatggaaatataatgaaaaaaacaacaaggtttcatggggtaattccgcctgtctctacaatagtagatcaaaatgaatgcttagatgaaaaaggaatgaaaaatttaattgactttctaattgagtctaaagtaaatgggctgttttttttagggtcgggcggagaatttagtcaaatgtcaacttctttaaggaagaaagtagcagaatttgcagttcagtatgtaaatggacgtttgccagttttaattggcactggtactccaagcacaaaagagactatctcactaagtatgcatgcaaaagaaataggggcagatgggatcgtagttattaacccatattattggccgttatccgaggataatctctttcagcattttgctcaaattgctgaaaaagtagatatgcccacccttttatataatttcccagcattaacaggccaagatttatcgccagaatttgttcttaaactagtcgaatcttatcctaatgttgtaggcattaaagaaaccgttgatgcagtctctcatacaagggaaatgattttaactgtaaaggctgcccatcctgattttgctgttttctcaggatacgatgatcattttttaaacacgttatctctcggtggagatggctccattcccggcactgcaaattttgcaccagagttttctgtaaatatttatcaatcttttatggacaaagactatgctcgcgcaattgaatcacatcgtctattgtcaggtttattatccttatatcaaatagataagccttttgtaagtgtaattaaagaagctctttctttaagggggataaaagtttctacaaacatgatagctccagctcgcgaacttagtgaaagaaagaaggaacaagtagaacaaatactaggccaggcactagggacagaaaaattttcataaattattaatgaaagatgtttttttcgaggaacctatattctccaattaatagaagatagtatgtgcaacataaaaatatatctttttttataaaaaatcttattaacggaggaatacatatgtcattgcaatccatatttggcgaagaggatgtatctctttataaaattcaaactcatgcgaagggagcagatggttcactcccacttacacccgaaatgttgctagattcaccaagtggtgacctttttggattatcacaaaatgttggtatgggctgggcaccttcaaatctacttggaaaacaagttctaattctcggtactcaaggtggaatcaggaatcatgatggcactccaattgcattaggctatcatactgggcattgggaaataggtttattaatgaaggcatcagcccaagagatcagtagacaaggtggcgtgcccttcgcagggttcgtaagcgatccatgtgatgggcgctcccaaggaactgctggtatgtttgattcccttccttttcgaaatgatgcggctatagtttatcgaagattaattcgctcactgcctactcgcagggcagttattggagtagctacatgtgataaaggtcttccagcaatgatgatagctctggcatcaatgcatgacttgccaactatcattgtccctggaggtgttactcttccacctacaaatggagaagatgcaggaaagattcaaacaattggggcaagatacgcaaacaacgaaattactttgcaagaagctgctgaccttggatgtcgtgcttgtgctacaccgggaggaggatgccaatttcttgggacagctggtacctctcaagttgttgcggaagctgttggaatggctttaccccactcagcactagcaccttcaggccagtcagtatggatggagatggctaagcaatcagcacgtgcagctttagaaatggagaagaaaaagattttcaccaaagatataattacagataaagctatagagaatgctatggtccttcatgcagctttcgggggttcaacaaatttattacttcatattccagcaattgctcatgcagctaattgtaagatacctaccgttgaagattggactagaatcaataaaaaagttcctcgtttggtcgatgtactaccaaacggtcctgtaggccatacaactgttaaggtattcttagcaggtggagtaccggaggtgatgcttcatttgagaaaattaggtgttttgcatgaagatgtactaacagttactggagaaactcttggttcaaacctcgattggtgggaaaaatcagaaagacgtgcaattatgaaaaaacaattgttagaagctgatggaatcaatcctgatgatattattatggatccagccaaagcaaaagaaaaaggtctaacttccacagttacattcccgaaaggaaatattgcccctgaaggatcagtaattaaatcaacttctattgatccatctgtggtaggagaagatggggtatatcgccatataggaaaagcaaaggtctttacttcagaaaaagcagccataaaatcgattaaaacaggaggcatagaagcaggagatataatggtggttatgggcggtggtccttcaggaaccggaatggaggaaacatatcaattaacatcggcactaaaacatttgtcttttggaaaacatgtctccttacttacagacgcgcgtttctctggtgtctctactggtgcatgtatcggacatattggacctgaggcattagctgggggaccaattggaaaattgcgtgatggagacataattgaaatcattattgaccgtaatcaattagtgggttcagttaattttgttggaacagagaatacgagactttctttagaaaaagcaactaaagtcctgcaagaacgtgaccttcatccagaactaaaaccggatccgggtcttccagatgatactcgtttgtgggctgcgcttcaatcggttagtggaggaacgtggcgtggaaatatctatgacacagatcgaattattgaggttctaaaagcaggcgtagaagcattagacaaagaaaaaacattagtacagaattaacctattaatattaatttaatttagggacttaattgaaagcgtttaccaaagggcgttttttcgaataattgtactttatgactagtaaacaaaatagcataagcgtcctagagttacttactaattaaaatataaagttagtgtttcaataagtggagcaagtaaaaatattttaattattttttggaggtatatcatgccattatttatagtagcgattgggattattctgttgctaattttgattactggatttaaattaaatacatttgtttcattgataattgtatcttttgttgtatctttagcacttggaatgcctatggaaaaggttgtcacatccattgaagctggattaggaggtacacttggtcatatagctttaatatttgggcttggtgcaatgcttgggagattaattgctgacgcagggggagctcagcgtatcgccatgactctaattaacaaatttggagaaaaaagaattcagtgggctgttgtagttgcttcgtttattgtaggtatagctttattttttgaagtaggattagttttattaatcccaattgtattttcgattgcgaaagaattaagagcctctatcttgcacttaggtattcctatggctgcagctttattagcaactcatagtttccttcccccacacccaggaccaacagtcatagctggtgagtatggtgctgacattggattagttttactctacggtattattgttgcaataccaaccgtcattatagcaggtcctttatatactaagatggctaaaaaaattgtacctgatgcattcaagaagacgggtaatatagcttctttaggtgaacaaaaaacattcaaacttaacgaaacaccaggtttcggcataagcgtattaactgcaatgtttcctgttttattaatgtctatatctacaattctagatatgattcaaaaatcagtaggatttgaagatgatacaacgattgaaataattcgtcttataggaaacccttcatctgcaatgttgatatctttaattcttgcattttatacaatgggaatagcaagaaatactcctataaaagaagttatgaactcttgtacatcatcaattgctgcaattggtatgatgctattaattattggaggtgggggtgccttcaagcaagtactaattgatggtggtgtaggagattatgtagcagaattgtttaaaggaacttcaatgtcacctatcatacttgcttgggtagttgctgcgttattacgtatctctttagggtcagccacagttgcggctatatccactgcaggattagttattccaatgctgtctcaatacgatgctaatttagccctagtcactcttgcaacgggagcgggaagtgcaatttgctcacatgttaatgatgcaggattttggatgattaaagaatattttggattaagtatgaaagaaacattttcaacatggacaatactttccactattacttccatagccggattagggttcattttgttattagatgcatccttaactatctcgataatgttaataatttccattagcctagtagcaatgtatttcagtatttttaaccagcctttcaagcaatctaaggataaaagtgatgttttggatgtataaaggtatatatataaagcctttaaaaaaataaaagattaaaaaggcagccaaatatttggctgcctttttagcaaaatcgcacaactagactatgcttttaattacctctactttatgatccaatcccagttgttatactagctttgatcatattcggtatttctctgtatagaagaaatgatccatcgttttctgtatgtaaggtaaccatttagattgttttataaacgcctgcctctttatgttatataaacaaacaatcctcatatacatttattgaatggcttctttaaacttgtcacgaaataaaacataagttgataaagattacataggaggagaaaacatgtttgttcatatagttcaacctggtgataccctgtcttcaataagcagtagatatgattatcccattgcgcagcttaggagggtaaatgggttagaagaaacaaatattgttccaggtcaagccttacttatagcttcttatgtgtacacagttcaacctggtgatacgatgaggagtattgctaaaaaagcttatgtatccttagaacaattaaaaggagctaatccttcagtccattataattatttgcaggtgggaatgaaaatgaaaatccctaatatatcagactatattgcaggtacactggagtattatgccgttcgaaatccagaattagatcgcgatttaattactgattttgcaacttattcctcgtccatttctatctttgaatatcattttggcaccaatggagatattatgaatgatttaaacgatttagtagcaattgaaacgacttggaaaaaccgagttacaccgttagttacgattactaatctaacttctgaagggtttagttctgatcttgcccatcaagttttaaataatcctcaagcaagaaacaatcttgttaataatattttttatttagtatctagaaaaggatacggcggggtgaatattgattttgaacgtgtaaaggccgaggatagagatttttttacaggatttttacgtcagctgggtgaacgtttaaaacctgcagggtacgtactgaccatagcggttccagcgaagacaagcgaagatattccttggttaaaaggatatgattacgggggaataggtgccgttgttaactatatgttcattatggcatatgattggcatcatgcaggcagcgaaccagggcctgttgcacctattactgaagtaaaaaaaacaatagaatttgcgataaaaagtgttccgcgaagaaaacttatcattggagtccctttgtatggatataactggtcaattccttacaagcccgtcacagtagcatctgctatatccaatcaagatgcgattaaaacagcgacgaaatatcagtctcccatccaatattctaaggagtataaatcaccattttttcagtatagagatcaagggggacagatgcacgaagtatggtttgaagatgtaagaagcatgagtgaaaaaatggtgttagttcgtaaatttggtttgcaagcaataggagcttggcaattaacacttggatttacgccagggccttggcttttaaagaaatttttcactattagaacggtataaatagcactaatttttatgaatcaatttagatatttttcagttaacagttattcgatatacgtggttaataataaaaaaattctatttatattaacttataagagattggaggtagtgctatggcaaaaaggatagannnnnnnnnnnnnnnnnnnnnnnnnnnnnnnnnnnnnnnnnnnnnnnnnnnnnnnnnnnnnnnnnnnnnnnnnnnnnnnnnnnnnnnnnnnnnnnnnnnnattggaggtagtgctatggcaaaaaggatagatgtctcaataaagcagcatcaattaaaactatatgatggagctaaattagtaaagacatatccgattgctgtagggaaaatgattactccaactccaaccggaaaatttaaaattattaataaagatactacccctccagctgtatttggtcccttatggatgggactgtcaaaacctacatatggaatacatgggactaatgatccagcttctattggcagagatatgtcacatggatgtgtcagaatggacaatgaagatattctagaactttcctctgtagttcccattggaacgccggtttacatacataaataatagtttaagaagagtgtgactgtttacatttagctaattgtcgagatcgagggtatcaaagtttaagtagatgctatacaatcacgggctctttgtacgaaaacaaaaaagtaccccgattaacagaggtacttttagcattttaacttattttgatgctggagacgtagtaacttctggagacgttactttgtcataaaaatctacgaatttgtcacgatcctcgctatcacggtaagccatagcaacacgtggatgttcattcagtacaccagaaatcatgtaaggaatgatatacccccactcccacttttgacgcatttcaagcatatgtttttcaattactccaagaatcggcttcatctcatagcttggttttgggatgtagctaacaagcagctctgtgttacagttaccagctgcacggcccataccataaacagatgaatcaaggaatgtaactccattacgcatcgcagttaatgtattagcaaaagctaactgcatgttgttatgcgtatggatcccaagctgtttgctaggaatcatggcttgaaactttttcacttgatgctcaatatccgcagggtctaggcttccaaaggagtcaacgatatatacaacatctacggggcttttctttaccatttcaaatgcttcaataagctgattttccggtacgctagatagtgccataatgttaagtgaagtctcatagcccaaatcgtgaaacatttttataagctctaagcctttatctacttcgcgaatatagcatgccactcgaatcatatctaacatactttgttcactcggcagaatgtcgtttggatctacgcgcccaatatctactaaggcagatagcttcgtaaactttttctcagggataatttctttgagaaagttatcgtcaagaaatctccatggattgggctcggttgcttgaagaagcttaggtgaatttttataaccgacctccatatattcaacgccggctgcgcttaggccgttatataagtcttgcacaaattcaacactaaaatcccaattattaattaaacctccgtcacgaatggtacagtctataattttgctattatgtcccatggtagttgtttcctcctatgtattctatttatataaatattgttttaaactttatcgcttttatgcttttaagtgttaaactctcctattgtgtttataccatgactaattcagaggcgtcaatgtattttctaaatgtttcactgctttactgcatttcatggtaggagatgcttcggctttttatccgcttgatgctcttaaaacaacaccaagttcagcactacaacccctagtatatacaaacacaacctttattacatcactacttactgcaataaagattgttttttaagtgaaactgtttattagggagggaactgtcattagtatctagattataggtttagattgctctataattaatccataaatttgggaagaaatttaaaacctgagaaataagaaacttttttgcattaacagttgtataggaaatattagttgttacttaatcattttaatttacttgtctttacatcgtccaaaacgtaagaaatgataagagtatagaggtaataaacatcgcaatcaacggctttaatgcttttgttcgaagagctttcaaacttacatttaaccctagcccgaccatagccattgttaaaagaaaggtagttagagttgaaatatcattcatgatcgtcttaggtattataaggtgcttaccaacgacataactcccaaaaatactcatgattataaaacctattaaaaaccaagggaattcaatcttggtatccttttcaatttttcctgttcgcttcatccagtacattaagataaagcttaatggcacaagtaagagcactctgcctaacttagccaacagtccaatagctagagcatcgcgtccagacggtgctgcagctagagctacatgggcaatttcatggagacctacgcctgaccaaattccatattgaatatttgttaaatgtatataaggtcttaaaatggtatatccaatcgcaaatagggttcccactaaagcaataacaccagctccgatagctgtatcttcttcttttgcttttacaattggagaaacagctgcaatagctgcagcaccgcatattcctgttcctatccctaaaagaagggataaaccgctatcagccttcatccatttggctagaaaaaccgttaaaacaatcgcaaatacagccgttcccacatcgcgaagcaccaatcctaatccgtgatgaataacaacatcaatattaagctttagtccatataaaacaatcgcatagcgcaacagctttttagaagaaaactcgattccaaatcttattttttcagggtacccccaaatttgacgataaatgactgctattataattgaacaggctagtggaccaatatgatcgaatcccgggactttcgctaatccataagccagtaaagcaaaaagaaaagtaaaagcaattcctccggcccataaagaaacattagatgacgtctgggcatttgttcgtgagaatagagtccgtttttgggctttatttatatttaacatacatttcatctccaatatgaattcttatcaagtgcaacttcacacaagaagaggatactttaactataaaagaaggtttattattagtaaaatatatataaatcataatttcgattaaaaatattaataactaatgcgtaaaagcagcaagttgatcttcagattcactgaaaatcaacttgctgcttttattggttttttagttctcattacacgttttgatatctgaaacatagtccatcaactactaattttacaaaactgcataaaaatatcggttcttatgagagaaagacagccttactagttgccaagccttttttgcgtctataccatagcagaatcaagctgcctagcacacaaaggaaagaaactaattgagctattctgatatgagaggttaacattaagctatctgtacgcagtccttctataaaaaatcttcctatcgaataccatagcaggtaagtaagaaagacttcgcctctttttaacaaggattttcttagtacgattagaacaagcacacctattatgttccaaagtgattcatagagaaacgtaggatgatagtaagttccatttatatacatttggttaataataaaatcaggcaaatgtaaagcttctaagaactgacgtgtaacaggtccgccatgtgcttcttgattcatgaagtttccccaccggccaatagcttggcctaataataagctaggagctaaaacatcagccattttccaaaaagaaagattcttttttctgcaaaaccatatagctgttaatacagagccaataattccaccgtgaatagctatgcctccatgccaaattgctataatttcgcctgggtggtctttataataactccattcaaaaagtacgtagtaaattcgagcagtaatgatagcaatgggtagtgctagcagaagtaaatcagagatggtttctgaagagatccctcgtttctttccttctttcgaggctaacaagaagcctaagaaagctcctattcctatgataattccataccaatggacttcaagtggaccaagatggaaggcgatagggcttaaaggttgtgtgtgttggttcatgtcttttctcctttacttcatatcgattttcttacattttttaagagtagtattaaattagagtgcctttttagtatatctaattggataaagaaaggacaacttttgcttacgaacgatcatgatttctttgcctactttagtgtaacagaataatctccttagaatagtcaaaattaaaatagacagtacattgacttaattaccaaaatatactattataattttagacaatacactgtctaaaatggagggtgaatatggatatttataaagagcttttcttaatgcagcaaacttacgctaccttattttctctggcaaataaaattcaagtaaaaggtgataaatctcttgaacttttaacatcaagacagcatatggctatggtggcaattgctcatttacctgaagatgaaacaacgttgaataatattgctagaaaattaggaactacaaaacaaagcgtcaaacagttaattaccattatggaaaagaagggttatgttgacgtagttcctagcagtaaagataagcgtgcagttaacgtaaaaattacaaaagcgggaaaagaagcactgcttgttgtctcagaaaaaggaattttctttttggaagaactttttaaaaagttctcaactgaagagttggaaataatgtggaagcttttgaagaaactctatagcttcgatggggaagaacatgatggatttgaagaagaaggcaacatcaaaatggatgatgatcacgatgaattacagttgagagtaataggagaacttgaaagtcgaagagttcaagcaattgataatatgagaaagaatataaaaaaaactcgataggctaatctaacttaaagcatatcgattaatccttttaaaattttaaaaataaaggataagggagagcaatcattatgtttgaaatcagcgatgaaacattacgattaattaataaaacctgcaaaggaaaaaagcacttgaaactaaccgttggctacttaacggacaatcagtctattataaaagtctataatgaaagcggtgaaattgactcggcaaaaagatatcattatgaaattggttctattacgaaaactttcactgtatcgctgttatcaaaatacatatttgaaaacaaggtgtcgtcaaacgactctatacatcctacattgctccgcctcgctactcactcttctggatattcaggaagcttacctttaaataaacgggaatattttaaaataattttaagtgtgatttttggaggaagcgatttgaataaaaataatccgttgcacatggattttaacaaaatgaaaatgctaattgaaagaactaaattgaaagaagtagattattcgtggaaatattctaatttcggtatttcacttattggatatgtgttaggaactgtttcaggcaaaggatattgggacactatgaatgactttcttcataatgagcttagactaaaggatacttatttaggtacttcaaataataatttacaaggttatgaccgccaaaataatgattgcggcaactggcagtgggacaaagaaaactttatatcaccggcgggggcagtatcctcaacggctgaagatttacttgaatacgcaaaaataaatatgtacgaagataaaccatatctttcttcttgtcataaaaaacacggtaatggaacaaagaaatttgatatgggtcttggatggttgcttttaaagagaaataataatgtaatgttgcacggcggtggaacaggatgcttcagctcatttttagggattgataaagaaaataaagttgcgtccgtcgttttagctaattatagactaggtagaaataatgatgaacatataggaatgtctttattagaaagcctgcaaaagtcaaaagatatataagaatagtctacaaaaaaacgaagaaaattagtctattacagttcaccttacctctttactctcaattaattgagagattatcatcaatataccgaccttcaaaaagcatagataccgcttctttttttgatgaaaccgtgctattatcattaaggtttataaagaacagaaaatttgtgtctttacgtacattcttttggtatagtgttagaaataaggagtgggtaagttggtttttactgaattcttccagcagtttcccgtaaaggttttaacggtagcgctgttgattatacttatcgtttattttattcgcaaattcattaagcttttctttgataaaacgagctttttagatgaaaaacgagaagaaaccttaatgcatttttctaatcaggtgacaagagtagtaggcctggcttttttctttatttatgtgcttagccatttctttgacttcggaaagattctcactagttcagtagtgttggccagtgccctggcaataatcctccagcatattattcgtgattatataatgggactgacttacttgtttgaacgccagatccatcacggagattatgttattctcaacggaaaccgccaaggaaaaatagaagaaatcaccatgcgctacttaaagattcgccagtatgacggctacctctataccgtctcatatagcaacattacggaacttcagaacggaacccgaggaagacgccgggtaaatgaaagtcttattctcaactatagacaaaacccggacgatgcttttaaagtaatggagcaagtagcacaaacatgtaacgagaaatatggccagtatttgctgaaagatgtgaatggaattcctatagaaagttttcaattcaatcaaattactgaactgaacgtaggttttaaaggtcaccaatattcattatcaggccttgtgaaggaagctgattttgtagaagcgggtcaaaaggtgagatatgaactcgcaatggctgcctacaaaaatgacctaatgatggctgaaagcttcgagacaagccattaaaaataaaactcgtatattgtttatatacaagcttttatacttaagataaaaatacccttttaattatagaagatatgttcgtatatgataagaagtgaaaagttgtctttttcgttagtaagagtaaatagataaattaataattcacattaaataccttaccatttacttaacgtatgtagattatcctgaaacaaaagacgttctttactttaaagcgttaaattattaacgtgttattaaacaatttttcttttagtgctattccttattcaaaaaagcacaaatcatatatagtgggtttgtgcttttctatttttacagatatcgccgaatttaattaccataatatcccttaagagagttgattatgaactattatgctaataagcaactttaaggatttaatgacttttatcttcccatggttcgaaggaaaatggaattccaaccatttttgcagttaattcatcataggacacgagatccttttttgacaattcttttaatgagcgtttgcccattgctcttaatgccattttcatttcttctgtacttgctgttaagaatttctctgctgcttttactccttcttcaatcttaaattgatccttgaattttccttgattccaaacgacttgtgtaggcggttcaaatggaaggggattcaatgattgagtatgggagacggtaaataacatagcagagcctacatatactgcatcggctccgagagcgattacttttaagaaatgcccggggactaggaggccgccagaggcaattaaactaattttccctttcatgtttctcttttctaaatgattggcagccctgacaatcgcatgaagggttgggattccaaagtcgtcggataaaataggtggggcacctaatgtagctgcttgtcccccatctaccgcaatataatcaataccaatgtcaattaaatgatcgatgtcctcttcaattttcccaccagctcccattttggccccaatgggaaccccaccagacagctcacgaagtgtttcaacaagttctttcaaatcatctaaagtttggtcttcaaaaaaattatcgtaaattactgcatcctcgttttcctttagtcccatcacttcacgggcacgtcctgttaaatttttaggtgaaatcttcccacccgttcctgctaaagcaccttgcccaaatttaacttcaatcatatcggcccttttaaatagctcttcttcttttgaccaatctgtttttgaaaactgtaaaatatactttccagcttggtttaattcttcaggtaagaccccaccttccccagaattaatcgctgttcccacattattcgctgcttcagccaaagaaagccttacttcttcactaagcgcaataccatatgccattccactgatcataagtggaatttttattttcattggtttttttgcttttggaccaatggtaaccgcaacatctacatcttcctcgccatcaattggaaatggtgacgtttgcgcagggataaaggtaagtggatccaaatgcggccattttttggaagatccaagtggacgatggaggacgtcgcccgtcgctgcacgcaagctattttctagcatattttgaatacccatatgccgaagtcccggcatcaattccattatattttcttgataactatcggttaaaacaattttccccatttgtttcactgttcgttttattatccagcgccaaccaaaaagaacgaataaaaaaaagaaaagtataattgccatcatcgcaaaggtcaaataataaaaaatgttcgacatatttatgactccatatttagcatattttcaatatgtaagtttacacttcttattttatccaaaaaagataaattatataaaaaagaggatttgaaaatagttgagcttttttccattccaaattgtataaaagttttactttcaaccaaactatggatatatataaggggtgatttcatgaacataatgaatgatgttattcatcggtcttggccattggcttcaaaatattggattatgcgacaaacttggagaaatctattgtttttacattggcctattccactaaaaaaacttcgaccgtatgtgccttcttctctacaaattgacacctttaatggatccgcatggataggtgtcattttattcgttttagagggaatctatccccgtggaatatcatctgtttccctaacccctaaattcccagaaatcaatgtaaggacatatgttaaacgcaatggtaagcccggtatttattttatgtctattgacgttgggaactgggcttccttaaacattgcaaagaggtggtatcgtttgccttatcattcagcgcaaatttcttttcgaaaagaaggccacacctttcattgccagagtattcgcaaaggaaacacgaatacttctatatccttcaatggtaaatatgctcccgtatctgaagtttatttttcaaaagaaggaactcttgatcattggttaactgagcgatattgtctctatagttcgagtaacggagccaacatctattctggtgaaatacaccaccagccttggccgttacaaaaagcagagatagaaatatttaggaataacctttttataccttttcattttaacctttctgaagtagaaccgatcgctcatttctccataggtgtggattcgctaatatggaatattaagaaaataaggaacgaataaacatccttcaatcggaatcctgatgtattccaaacttggggatgatctataatttatatttacacaaaaacaaaaattacatttattagaaatatcaagtgataaggaatgctcttataatagttaagatttaaaagctgtaagattatttattatagactaaacgctccttttatcaggctaacagtccgttccattttatataaatctcgtaactatacataatatttttaaaataatttttaaaaggaagttgaagtagtggatagagatcaagttattgaaatttatcagcaagttctagatgggaaaagaaaacgatttcctaacggtttttttgtaggtaacgaaggaaaaacatatatgaactatataacacgctatctacttgaacaacggttatcaatccctattcatgaaatccctcttaaagtaggagcagatacattatggtctcatcgccttagaccacctgctatgttatatggatggaattactacgaagtcattgataatgcctatcctggagaattccagccgtgggaatttcgacaagtaccccgtaaatattggaaaggagaagaagggaaaaatcgtgctattgaggcagtaaaatatgtactagaggaagaactaaaaattccttttaatgagattcctcatcgggttaattttcactttttcaaccaatatggtctaggaggtgtcttttccctctttagacaatccccttttcaagtgattgaagctgtttatccaggttcctttaaaccctggcaatttgctaatgttcctatgaattgttggaaaaacgaagcctctattcaagaggcaatggatgacttcttatttaaccaactccattttctatcctatgaagaggcgtttctcaacataaaaagtcaacacttcaatgattgtcagctcacaggtctctttcagatggccttcgatggccaaatgagtaatgtaaaaaaatggataaaacgtcaagaaatgcagaaagtcaactaaaaatggagacaagtgtccgtattagctctcatttccctttcttttttttataaaaagataggcagattcagcaaaaaaaagaaaaagaagaaaaaaaagcacaaataattcggtaacttccattactcgaaacggacttaccgcattgtataatgcttgagaaacatcaaatccttgaaaaatatcgatgcctaaagaaaaagtcattaaacatcccatcattaaaagggcaatacctatgattttcatacttatcacgctccatttagtagcttcttctttttcatatagtatgatacaaaaaatatttgttaaatattacataaaaaaactatatgtggttaaaataactaaaaataaagaaggagacttaaaccaatgtcttcattgtttaaaaatggaaaactaaaaaagactcgccagcaagagagtaaaaataaccctattaatacaggaaaatatatacaagattccttatcggccaatctcgataagattcatcagaaaacgggaaatagtccagacgttgttatccgtcagataaaaatgggaagcaattccgatatagaaacagcgattatctatatagagggtattgtagacaatcaatcgattcaagaatttttactggaatccatgatgaaagatgataagaaaacaaaagtgaataagcaaaatgcgttagaactgatttctgaagatatgatgaccattggtaacgtatcacccatccataactgggatgatttattttcaaccctaatggcaggtgatacgctcgttctagtagatggaataaatcaggtactgagcgccagtaccaaaggtggagaaacacgtacaatttcagaatcggacactcaaatggtagttcgaggcccaaaaggagcgtttacagagtcaattgggaccaatacagccatggtacgccgaatcataaagacccctgatttatggacagaatcattcaagataggtcgtgcaaccaatacggatgtgacgcttatgtacatccatgggattgccaatgatcaagtcattcaagaaatccgtcagcgcttaaacaaaattgatattgatagcattttggagtcaggttatattgaacaactgattgaagatcaaacagcaacgccttttcccactatttataataccgaaaggcctgatgtagtggctggaaatttgttagaagggcgcattgctattttcgttgatggaactccttttgtactggttgccccggctttattcatccaatttttccagtcggctgaggattattatgcccgttttgacattgccacatcgattcgtctgttacgaattgctatgtttctgatttctcttattgcacctgctacctatgttgctgtcacgaccttccatcaagagatggtacccacaacacttattgtagccattgctgcacagagagaatccgtcccctttccagcattcgtggaagctctactcatggagatcacctttgaaattttacgcgaagcagggattcgattgccaaaagccattggttcggccgtctccattgttggagctcttgtcattggacaagcagctgttcaggcgagtattgtatccccagcgatggttattatcgtctctataacggcaattgcgagctttgctacaccttcctttgatatggccatttcggctcgtttaattcgttttttatttatgttaggtgcagcttcatttggtttttatggcattatcctctgtattctcatgatggtcgttcatttatgcagtttacgctcattcggtgtgccctatatggcgccattcgcaccatttatacccgtcaataatggagatacagtggtacgactaccctggtggacattaagacaacgaccgagattaattagtgtaaatacgattcgagaagggaaaaatcaacgccctcatcctcctgcatctcgtggtatggtgaaccgagctcttgaagaaggtgacaacaatgaagcgtaaaggaattcttcttttattgatgacgacgatgacactcttgctctctagttgttggagtaaaaaagagttaaccgatctggccattgtatcagccatgggtgttgataaaacaaaagatggaagatatactgtcacgcttcaaattattaatccgggaaacgtggctggaggactggtaggcggaggtggtacgcaaagtccacctgttactatctattgggattccggcgataatttagtcgaagcaagtagacgagcttccagtaggatttcacgacgagtgtattatgcacataccaacctattagttattggagagaaattagcaagagaagatgggataaacgttttgatagatgcttttgatcgagacccggactttcgagctaatgcaactatggtgattgcaaatcacacaagtgcagcagatctcgtcaaaacattaacgcccgttgataaaattccagcgaataaagtgctgaaaacgttagaattcacagaaagaaaatggggagagaacgtaaaagtatcactccaagacgtcatgatgggactcgagtctcctggagggaaagccgttgtaggaggatttcgtatgattggagattataagcaagcgcgaaggttagagaatcttcaagaaagtgcgcctgaagcaacgcttcgagcttctggaattgctgttttaaaacgaggaaagttagtggattggttgtatggaaaaacagcaagaggaacggtatggattctagataaaatccaaggtaccgatattaatattgactggggagggaagaaagaagccattgcttaccaaactgtccgtcaaaaaacaagtttgtctgctcaaatcaagaatggaaaacctcatatttcagttcatacccgtgttgagggagacattggtgaaatggaggtacctgtagatatcaccaatccaaatgtcattacaaaaattgaacaatcagtgaggcaagaaataaaaaaagagctgaagaaggctattgaacgtgcgcaaaaagataaaacagatatctttggattcggcgaagtcatccatcagtcgaggccaaatgaatggaaaaaaataaaaccagaatggaatgatgtgtactttccaaaatcaaaagtcgatattactgtcgaagcttatgtccgccgcgcaggtttacgaaataagtcgttcctttcaggagtgaaagagaattaataatgaaaagaggaggtaccaattaaatggagaaagccaaaattagtgctagtcaattatttattttaatggaactatttgaattgggcagtgctttattggtacctcttgccatagacgcaaaacaggatgcttggttggcgattttgcttggtatgctaggtagcctggttctatttttagtctatcataaactgtacacctattatcccgacctcttacctacagagtacatgcaaaagctcttaggcaaaggtcttggaacgatccttgccgttatctatattctttactttatgtatgatgcttcaagggttctacgtgattttggtgaaatgttgttaacctttgcctataccgatacgcctttatttatagcgaatgccttattaatgctggtcattatttataccattcgacaaggaattgaggttattgctcgatcaggagagctcctgtttatttttatgtatgccctggcgattgttggatttactctgattgtttcttcaggtttaatcgacgttacacgcttaaagcctgtgcttgaagaaggcttgttaccagtcctaaaagtggcagtgactcaaaccctgtatttcccttttactgaagcaattgcgtttacaatgatttttccctatttgaaaaatcccaaaagagctaaggtaaccatactgtctgtaatcggattaagtggcatcaatttggctcttaccatgatgattaatgtgagtgtgctaggcgtagatttgacagcacgttcacagtttcctcttcttagtacggtacaagctattcaagtcgctgatttcttagaacgacttgatgtattttttatgcttgctttagtaattggtattttctttaaaattagtgtgttattttatgcagctgtcataggaacagctaacttatttaagattaaatcaccttcaagactttcgtatccgttggggctagtcgttctatttatgtctatcacgattgcgagaaatttccaagaacatctccatgaaggaattcgaatagtaccattagttctgcaaatgcctctcttcacaattatccctcttttgcttctccttattgctttcttcaaaaataggagtaagccgtaaaaagaaatattttatgtatagtagtgcttgaggatgaagcaattattaagatctgttgaattactagaggtaagtatttattaataaagatttaaaatatttgaggtgatttttatttatagttgggtttatgatcattttattaacacaattctatttcctcttacttgtataatgacgatagccattctattaagtatatatgcgtactttaagttaagaaaagcaaataaccaataacttctagttaataagatagccttcataaggaggtaattgtctagtggaaaaagcaaaaattagtggaagtcaactatttaccttaatgatgctgtttgaatttggaagtgcttttcttctccctgttgctatagaagcgaagcaagatgcttggctatccattatgttcggaatgatagggggaggtctcctatttttaatctactatcagctgtatcgttactatcctgacctattacttgtagaattcatcccaaaaattatggggaaatggattggtcgtttcttttcatttctttatattttctatttcgcaaaccttgctgccagagtcattcgggattttggagacatgttattgacatttgcctatcccgatactcccttatttattgtcaatgccttattaatgtttgttgttatctataccgttagcaaaggaatcgaagtcttggcaaggtctagtcagcttctgtttatgttaatctatctgtttgccatttctggattcattcttattgtatgttctggtttaattgacttggataatttacaacctgtattagaagaaggaattggtttacctttaaaaattgctttgactcaaaatatatattttccatttggtgaaatggttgtgtttttgataattttaccttatgtaaaaaatatgaataaaggaattggtttaagcgctattggattaacagggatcaatttaatgattactatgctaataaatgtgagtgtattaggtgtaagtcttaccgcacgttcacaatttcctcttttaagtacggttcagagtattcaagtagctgattttttagagcgtcttgacgtgttttttatgcttgcagccgttattggaggatttattaggataagcgtgtttttttatgctgttgtgataggtacaacaaatttatttaagattaaatcttcatctagcttatgctaccccttagggtttgttattctcctctattccctgtcgctagccaataattatgaggaacttgtacaagaggggattaaaacactaccgttttatctagatatcccacttcaagtcatagtgcctctattgcttcttattgtggctttctttagaaatagagccaggattaagaaatctgagtccactctagtagaatgaaaaatgtacaagtttatctgccaaatcaagctttcatgtaatgatttaaacttatttatataggaggttttagtattttcttaaaagttcctaatgaatttctataaaattcactctatcaccccctaataacaattcatcatttattcctattttctatacaaatatttaaggttgttaaatgcttacatatcatgttattctatatatcaacctaatcatttaatcgagtttaaaaaaatcatcactttgtaaagaaggcattgctattatatagtaatgccctctttacatttaaacatattatgtgatgttcaaaatatattttctgaaaattctttataataaattataataatgccatccttaacttccaacgcattacatgctagtcttatgtgtcctaatgtataaaggaacaaagcacctcttctttagccatcaaaagaagaggtgctttgttttagagaaattaatacttgaagatacatattatgattttttatttactatagatagctttagtagaataagttgtacaattgatttataaattataaatataggaaggcttttcgagtgaaaaaaaggaggttataatagatgacccaaactactattcccagagctgctgtgcgtggtacagcagttggagctatctttatggcatttttcgggaccctttgggcaggaattggaattagaggcatgcaggggtgggaatttcttgtacttattatcctgtctctctgattggagccctattatttatcggtgcaattgcattataaagaagtctagtcaattatctaacgaagtaatcaaaaagaatagggagcagtggagaaaaaagagtatatggttcggtattatttttagtttagaaggtcttttgattgctatggcttcttatatttgtgcatctactaatcacttagatttgtttgtgcctattatggcccttattgtcggtgctcatttttttcctctggcatcgctatttcaagtaccaatttattatattacagggatactcctgtgcttactagcaacgcttgtcatgttaacttttcctgtaaaaacaataataagcaatcatcacattatgacctggtgggtatctgtaggttttggctcagctttaatattatggggaactggggtaatagtttgccttagaggatttaagctgctcagtatagcccagaatggggccgagaatgataagttatctacccgattataatgtactttttgctattgataattggcactatgtatccatctttataaagtagaatgaacattttattaagttggcttttttaaatgtattatttgtgatagtgtacattatcacaaataatacaaatctttttttataaagacgagcatatgtataaaaagctgcatactccggaaaaagggtccttggcagaaccgtttctgcaacaagtgctctttttggtgtgtttcagaagcgtgtttatgtaacagaacactttatatcatctacaatataaaaagaaagaccacttggcctatttaatggttcttcttttgcagttattccaccagtttgcaatgaatgactctttacttagctctaacaataaaagcataaaattagttataattatagagagaattaaggagaatgtatactatatactgaacttacataatgtcgggttacataaataaaggaggtcacagagggccattcagtgacctcctttatttacgctttttgtttacgttgtttgacaaaatgaatattccagtaaattaaaatcgcaataatgatatactgtacaataggagaaatgactaaagctttagagatagggaactcatacacaatgacaactttcaccaacgcttctattatcagtccgataccccaaacagctgccattattcgtataaagtgacggaatgatacctcttcctcccaccgttttgtaatcacagatttttttgaagtaaacctcatcgcgaaataatagatcattggttttggtgctaataaagaaaataagaagacaagtcccattatacctgtcacatacgattctcttaacagaataaaacgttcatctcctccaatccacgctgccactatgctaagaacaattcctaaaaaaataaaagaagagaacatatccaactttttatcctttatgagatgataaagtgtatccactaatggtacacaagctgctaaagatagtgcaataatacttgtcatatgcgtttttaaaacagtatagattaaatagagtaaaataatattgaagaggacacttacaattatttcaacttttcttcttttcattctctacatcctcctttcattctttcaatatggtttattgaaccttccacaactttcgcaagagctaggagtaaaaggaacatgtaaaaatatattcgacatagaagaagtttacttctttatagaacaataagatttctagagtgctgaaattcgcattgagtaaccaagttatcgataaaacaaaagttcatttcctcagagagcgtttctctgaggaaatgaacttttattttacatataacggatcaatcaatacaaatttcagtgctttagaaacttttattttcttgcaatattcccaaaacatattcttattatcgtcatcatatctctaattactaattaggaatttattatttttctgtctccataaatggtgttaaattatatagctacgacattaatggcacagtaaataagaaatttatgaatttgtctgatgatgaaaagttaaatgttatattggagattttcgataaaacatctcaggtaacgaattcacatagccttattgaatgtgggaaaaatcaatattgtacaataaatgaaattaaactatcttatcatttccttatttttgtttaacattggatgaatagagtaaattttctaatgatcatctaaaaatgaggcggagatagaatgaaaaaagcgaaacaagctgctgtggcttctgcattagggttagctgtgttagcgacacccctaactctaccgtctttaggagatgatactggttctgcacaagcagcagaggttggaggagaagtcaccgttgatcctgtagcgattggacaggctattgatgacgcaaaaaaatcagctgataaccgaagtggattcgtcaagggagcgatggaaaaagcattctttgaatcgggtcagcaatataatgtaatggtgatgaatttgagtcaaggttataattcagatcaattacaaggtgtacaatactttgataccgtagattacgatggtattacgtatggagtctggatatttgaagaaggaacatttattaatgaaggtgatggaggctatgataactgggcctttagaggatggtttgaacgcacaggagatgacgagaaaaccgtcaattttcatagaccttaatttaatataaagatgaagatagtaaaagaatctattagagcaaataataagaagagccttcaccttgatggtaaaggctcttcttgttaaataagtttttaccatgtaatatcacaaacatgattgtttttgtgacgggtgcctggggctgtagaagtcactactatacgagtaataattgcattgaatggtatctatactatttttacaaatactaaatagatgatagtataaagaatcataagctaaatctaatatagaagaggtgatgaaaatcataacaaaagatgtaactcaatctacgctcgcaaaagaatttgttgctttacctacgccgtgtaatgatgttgtctactatcctgctaagttggctgacttagcaactgaagaaagatacacagttttccaaactcttagtcaaaaaagtggcctagcttatctcgctgttacccagcctggtacagctaagattgtactagcaggatctaaagatttcataaatgaagtatatcaagccattccttggtctcattatgaaatagcagatgaagataacaagttcgattacaaagaatccctttcattgcaagctttagaagattattttacttatcttaaagaacagtaatacatcttatggatacaactattgatgattaaaaagaccctctaccttattagagggtcttttagactaaactagtaaagagtgctagttggcaggcaccttttattaaataaaaaatcactgtaaagatgatttgaattcactatgatcgtgtaagcgaagaacctcacgtagcagttctatttgctgatacattctttctttcgttaaaggatctgtacaggtaggataatctttagttaaatttgaaagatccctcgtaaataatagcacttcatatttatctagcataaacagccctcttttctcacaagcagtttataacaatacaatatattttatatatacccttaggaaaaaatgactaactattcgttgttatccaaattactacaattatttcactgaaaaagtagtaggatagatataattaagttcactgaaaatgtagaggtgaagtttgtatgtattttggggactatatctatcatcttttagctcttagtggaggcgtgctagtaggtggagttataagttgggccactacgaacatcttgaagactaaaaaatatagagataattgaaatggataatacaataaaaactacctcgatacagaatgctccaacaagcgaggtagtttttatcaggattgacaattataaagtaccaaaatataaccgcaagtaaatcgtaacatgttttactcgtaaagactatttttcaccatacaaacatatgataaatggtgcccttcttatacatggatctttcatacacctatgaagaagccgttagcataataaagatgtataaaaagctgcatactccggaaaaagaatccttagtagaaccggtcagtccccgttctactttaagggttcttttttgcatacgaataaattagatggacaacgaatttaaatataaagtttataaaatggcctataaagttaaaaaagcacaaaccactatatatggtttgtgcttttttggctaaggaataacaataagaaaagattgtctaataacatggtaacaatttaacgctttaaagtaaaacttgaagtcatttattttattgtactcgggaacatcaataattttgtgttaatacgaatattcctcaatataaagagataattagttattaattaatcaatcaatagagtatgcctaaatgatagttgaggagagggttgattttactgtataatttaactatcatatagacttgtcttttaattattgattttgaggaggttttttatgatttttgggtatgcacgtgtttcagcctttgatcaacttttagattcgcagattgaacaattgagagaggcaaacgtcgatcgaattgtacaagaaaaagtatctggtattcaccatcaaaaagaagaattaacacaattgcttgatcaattagtaaaaggtgacacgttgatggtgacaagaatggatcgtctaggaagaaatacgaaacaattattggaacttattgaagaattagaggcacgaggtattcatttagtgattttaaatttaggtatcgatacacgaacaccttcaggaaaattcatcttaacagttatgtcagcatttagtgagcttgatcggacaatgattaaagaaaagcaacaagctggaattgccattgcaaaaagaaaaggtatatataaaggaaagaaacagaaatttacgttaaagcatgatggagtaaggcatgctatcgaactacatgaaaccactaataagcctgtaaaggaaatctgtaaaatcacaaatataagtgaagctactttttatcgccggtgaaaagaatatcagaaactaaaaaatgcggtgtctacgggagaatagtagaaagaattttatttttcactacataaacagctatctatagtcgattaaagtaaagaggattaactatttagttgtaatatagtggatggtcactataaaatagagtattaagcttaaaacaaacggtaaatgataaaaagtatttatgtaaggaggtactatgatgaaaaagtctatagcagttctgccagaagagtggatgaaactagtaaaagatgcaatgaattcaaatgtgagtaaagaagaatttaaacagtttctagaagcaaaatcttaagataacacggtaataaaaaacattagatagcgtgcctatctaatgttttttattatcactaggtttgtttattatctaagaatgcttttacttctttaaccgataaccctacttccttagcctcttggataagtctaatccattcttggtctaaatgtgacgttattacttcttttttactgtccataaacataaattcctccagataatatctattaagtacttctccagtacagattaattatctgaaacggaaaaaattaattagtatatctaaattattcttctagcgacatggtaaaattaaacaaaatactaaaagaggtaaagggggagtaactatgtcacaaaaagctaattatacaaaaatcaactcaaaaatgtgggatgagtgggcttcagctggaggagaatggtcattagctattaatcatcaagatttcgcagatgcaactcaaggtatttttgatatttacttaacaccttgtaagcctgttccacataactggtttattccatttaaaaaagcaaaaatattgggacttgctagcggaggaggacagcaatgcccagtctttgcagcacagcatgcggaagttacggtttttgactactctgataagcaattagaattagaaaaaatggtggctactagagaaggctattccattgatttagttaaaggagatatgagtaagacattcccctttgaagatgagacgttcgatatgatttttaatcctgtatcaaactgttatattcaagatgttgaacacgtttggcaagaatgtttcagagttcttaaaaaaggtggcgttctgctatctggctttgcaaatcctgctctttatttatttggagaagatgagaaagcattgcaagtggttaataaattaccttatgacggaactaaaaacactgtagaaaatgatgaagaacttataaagaatggcggtgtacagtttagtcattctttagaaactcaaattgggggccagctaaaagctggattcactctacaagatctttatgaagatcatcaccacaaagggaaaatcactgaatatatgccttgttatattgcgactaaatctattaaataatagttggttatcatattgaatgagctacctcaactttttccaatacggcgtcatagtagaataatggctcaaaaatgagatgccatgttcaccgagagaaatggcagaaaaagtggacgagcttttagaaaaaaacttataagcctatttttggttgaacagatgcttcaaaagaatgaaatggtttacctcctatttctaattacagtattttttgttttaacgtggaaaaaaagggtaaatattctaataatcacctaaaaataggaggagatcaaatgagaaaagcgaaacaagctgttgtagcttctgccgtaggtttagctgtgttagcgacgccattagctctaccgaatttaggaggttctgcaggctccgcagaagctgcagaagttggaggagacgtaacagttgatcccgtagccataggacaagcgattgcagatgcggctaaaacagccgacaatcgaaatggtttcgtcaagggagcaatggaaaaagcattctttgaatcaggtcaacaatacaatgtaatggttatgaatttgagccaagggtataattcagatcaattacaaggtgttcaatattttgacaccgtagattatgatggtattacctatggtgtctgggtatttgaagaaggaacatttattaatgaaggcgatggaggttatgataactgggctttcagaggatggtttgaacgaacaggagatgacgagaaaacagtcaattttcatagaccttaattaaaaataaagataacaagagattcccattagggaagagcataggaagagcctttaccgccatggtaaaggtttttctcattgaataagtttgcattttcaagttaatatagtttcgcggatactacttaattaagtacttatattataaaaaaacaaggcgttattaataaagaagtaaaatatatttaaggagtttatttaaaccgttacaatctttttaattcttcttcctgctgacttatataagcattgccccacttctctaaagattttagtattggaacaaagctttctccaagatctgttaaataatataaaacccttttagggttatcgtttgtttcttctctttcaatcaatccgtttttttccatatccctaagctgcagtgtaaggatacgctgggtaatacccggtatttcacggcgcattgcattataatacatgggtgattttgataacaaagataaaataatacctttccatttaccacccatcatatgcatcgttaactcaattggacaagcacgctttacagttaacgtacaaggaccgtattgatcacttttaaagtctgacattttttcacctcaatggctagtaacaaaattgtgccttcttgttacgtctattttttcttactaaacttatattatcaaataaaacaaaagaaggtgcatcaattggaatttgtccaaatttctagacatatttacaaacttacttacaaaactgttgtgggaattcctgtcaaaattaatacatggtacgtgctagatggtgagagtgttcatatcattgatacaggaatgaaagactatgcacatactcagttaaatatagcaaaatctttaggtatccccaaaagtattttactcacacatggccatttagatcacattaatggcgccaagtatttaagagataatttaaatattcctatttacgcccacgaagttgaagcgccttttatcaatggcgaaaaaccatatccaaataaggcagaaaaagaaacaacaggggtggaacatcaagtcgaaagtctaagtaacaacatcattaaaaagttacctgtagatgtgtatttaacacccggtcatacaccaggacatgtgatataccaccataaagatgacaatgtgctgctaactggagacttattcttttctaacgctgaatccttacatccgccgattcgaaagtttacagttgatatgggtgaaaatattaatagcggacgaattatagataaaattaaaccttctattatttcttcatcacatggcgaagatgtcaaatacaactgtgatttatatcctatttataaatttatatatgaagaagagggagaaaaatgaaaatacaattatttcaaacagagattatagaaggtgaagttaagcaaaacgaaaaccgcattgagtccttatttgaagaaaagctgcatatagatactgagattgttgtgatacctgaaatgtggaatacaggttatgatttaaaaaatgtagcagaaaaagcagatattgatttaaagagaacttttccctttattcaacgtttagcaattaaccatcaagtgaatatcattgcaggttcagtttcaaataaaagaaatgaaaatatttataatacagcctttgctgtatcaaaaacgggtaagctgctctatcaaaaagataagatacatctcgtgccgatgttggatgaacatcattatttaacagggggagatgaagtcccagatgtctttgagattaacaatatcaaagccagtcaaattatatgctatgatttacgttttccagaaatcacacgctacccaacgtctcaaggtgcaaaagtcatattctacgttgcacaatggactaccagaaatatagaccattggagaacactattgagggcaagagctatagaaaattgtgtttatgtcattgcatgtaacagcgtgggaaaagtgagtaatgaaaatcatgtcggcaacacttacgcagggcattcaatggtcattgatccaaatggaaacatcgtagaagaggggggagatcaagaagagattataacagcggaaattcatatacagaaagttacagaacaacaaacatacattccaatatttgaaagtctgagaccggatgtttataagcatgcagaatagaaatttgtatatcatctcaaatttggatgttatcagactatcttatgaaggtttactaaaaaaagaggaaattccacctgaaaatactatattttttaaaattaacatatgtataaaaggtgcacttcttatacattagtttctcatccacctactgagaaaacgttgatcagtcaacaatgtataaaaagctgcatactccggaaaaagggcccttggaagaactatccttcgtcaagggtccttttttataatgttttctggaagagtgattgtgttaacaaattatgtacgaattatacatacgcttttataaggattttaatatataattaaggtaaaaaagaattattttaggaagaggaaaatgtgtgaaacatagtcgattgttgcttttatcgctaattagtagtttgttcgttattttagtggccttgttccagtgggatctggttgatattataacagaatttttaatgttacctatttggttatttgtatatgctttctttatcataatgactatatggacattaattcatctttttaaaaagagaaagtggcagccgtttgttattcagctcattactatctcattatggtttttctttccattcaatcaagtcaacttagatctcaactttaaaatcgatcaagataagagagaagaggttgcaactaaaatagaaaatggtgttattaaacctaatgtatctgatagtccatcacttattcaattacctaaaaagtatactcaattgtctaaaggtgggggtgacatcgtagtagaaacgaaaggaaaggctaaatcaattcttttctttacataccgtgggatgctagacaatttttcgggatttgtatataacccaaacgataacaaaccttcaaaaagcgattttaacggggattttaaacaaataaaaaaagtacataaaaactggtattatgtatcttcttattaaaaagaacctgctgttttgatagcaggtccttcttgttacttatttcttttttaaccttttaacaactttaaaagctaggaatcctattaaaccaataattattaagaataatagcaatcctgttggattaaatgtactcataataccatccttatggtttctataatttacaatttacaatgttatcatatttaaatggtttgcacatttctccttcaggactttttactcctataatagaagcccaatttcattctttcttctttttttggtgaccaggactcttatactagttcaaccttagtttttatttttggtttgtaaatattctttttgaaacatacacattcttatagcgttatgatagcttccatcaacaaaaaattcatcctttaactcgccttcgatagaaaaaccaaccttcttatagatatgaattgctttttcattttccttgtctacaattaagtaaagtttatgcatattcaataccgaaaaggcataattcattgctaggtttgtggcaaccattgcgtagccatgaccttgatacgtagggtcgatgataatttgaaactctgctctacgatgaatataatcaatttcgactaattccactagtccaagcatatccccgtccttttcaaggatgaaacgacgctcaccttgatcgtgaatatgtttatcatataagtcctgtagctctacaaaagcttcataaggctcttcaaaccaataagacataatgtttgcatcattattgagttcatggacaaattttaaatcttctctttccaaaggacgtaacttaagttccttattcatttctcaaacctccacattctagcattactttagcactttccgttttaaatgtaaaaattgctgtagttttaaaaaataataaaacatagtgcgattatttacatctttattaaaagaatcatagtatatttaaaaatctcgcaagtgaaattgattaactttaaggaggatcttatgaaaaaagcagttggtattattcttattttactgtgctgtataaatcaaagggttgaggcagctaatcaaccttcagcagctcctataatacatcatgaaatttatgtttctcctacaggggatgacaaaaacctgggtactaaaagcaaaccttttagaacattaagaaaggcaagtgaagtagctcagcccggaactaccgtttacatcagaggcggtacctactatgaacaattaattattagccgttcaggtactaaacaaaagtctattatcttcaggaactataaaagtgaaaagcctcttattagtggagaaaaaataaaaagccgttctacagatggagggctagttagcataaaaaataagagctacataacaattcaaggtttgaatataggtcattcgtctacttctaaggcacaaaatacaccatgcggtattttagtagaaggaagtggaaagcaccttcgaattattaataatcatattttcgatattaagactgcacataaaaatggaaacgctcatggaatagctttttatggatccaaagcgccgcgttcgttagaaaacattgaaatatcgcgaaacctacttgaaaacttgaccttaggttttagtgaagcactaactctaaatggaaatgttaaagattttatcgtcaatgccaatacaattcgaaacgttgataatattgggattgacgtaattggctttgaaaaagtagctcctattgagaaatatgaccgagctcgtgaaggactcattagtgagaaccatatttacaacgtcagcagttattcaaatcctgcttacaaacatgaatactccgctgggggaatctacgtagacggaggaaaagatgttattattgagcataacgtttcaagtcataacgatctaggaatagaaatcgcaagtgaacactatggtaaacaaactagcaatgttcaagttatacgaaatatgatttataagaatcgttttacaggaatttcaattggaggctatgataaaaaacgtggagggacgataaatactcttattgaacataatattttatatggaaatgatatgatgaacatggatggtggccaattactgatgcaatatcatgcaactcataacactattaacaataatgttatggtttcagtaaaatctaatttgcttctggccaatcttcattactcaaataaatataatcaacttaatcataatgtgtacctaaataaaagtagagataaagcgaatcgatggatatggaaggggaaagaaatagaaagttctactatcgtatcacctaggcttttttaatgaaaatttctttttagaagatattctttatttagttgctcgctaggatcctatttaaggccgaaaaattattcacttcactatctgctgattatactttttatttcattgaaacaaagagaaaggtgcgttcgttgtaagtataccaatggattgcaagaagattcatgctatttctctatatgagtagtgtttatttaggtacaactcaatagccttgacataaaaacacccccatcattagagtttttttatctaataatggggtgcagttcaagccgtgggaaaggtgttttatgcctttattggttttcgttttcgctatcgttatctataacattatcgttattaatattatcaccatatttgaaatcaataattttttttctaatttcttctctaatttcagggttttcttttaagaaaatcttagcgttttctcgtccctgtcctaaacgctcctcattatatgaaaaccaagatccagacttttgaacaatatctacttcagaaccaatgtctaagatttctccttcttttgagataccttctccatacataatatctacttcagcaatgcggaaaggaggtgccatcttatttttgactactttaattcttgttttattcccaactatgtcattccctagtttaagttgttcagcgcggcgaacctcaagacgaacggaagaatagaattttagtgctcttccacctggcgttgtttccgggtttccaaacataacgcctactttctccctgatttggttgatgaagatagcaatggttttagacttattgattgctccagatagtttacgaagagcttgagacatcaaacgagcttgtaaacctacgtgagaatctcccatttctccttcaatttctttttgcggaactaatgctgctactgagtcaacaacaataatatctacagcaccacttctaactaatgcttcagcaatttcaagtgcctgttcaccagtatctggttgagataacagtaactcatcaatatctacacctagttttcttgcataaactggatcaagtgcgtgttcagcatcaataaaggcagctcgacctccatttttttgtacttctgcaattgcgtgtaaggaaacggttgttttacctgaactttcgggcccgtaaacttccataattcttcctttgggataaccattaattccaagagctatatctaaagctaatgagcctgagctagatgcctcaacttttgtatgtgtgccttctcccattttaataatggatcctgtaccaaattgtttttcaatttgttttagagccatatctagtgctgcttttttatcattcataatttgaaacctccgattgttattacgtttacaataaacgccaaggtatttcgataaagaataagagttggctcaaatgtttttgctccgtgcgagaaaattttgtgtttaactgtcttagtttgctctggtattcctttattcatctctaaccccttagtgtcgaacaaatgttcctgttgtgtaatcatacaataaacgcatctaattgtaaaggcgaaagtttttctgcaaagtagctaaaagaatatcttatatttataaaaagtaagtttatactttagcatttacttatcaaatgatagaaattaggggaaaggtagctttttatatnnnnnnnnnnnnnnnnnnnnnnnnnnnnnnnnnnnnnnnnnnnnnnnnnnnnnnnnnnnnnnnnnnnnnnnnnnnnnnnnnnnnnnnnnnnnnnnnnnnntatatgaatctataaatctggttagactaataacgcattcctcatattcctagttactataaaacagattttaagaagaaataaagcagtctacacaaatagactgctttttgattaattatttacctgtttcagcaaaacgctgaatacgttcagcgatttcatcacgtacacgctggaagaacgcccatttctcttcatctgttccttcagcttttgcaggatcgtcaaatccccagtgttcacgtttcacatggggaggcgttactgggcagtgatctgctgcatggccacataatgtaacgaccaaatccgcattatttaaaatttcagggtcaatgacatcagatgtttggtttgagatatcaacaccagcttctttcattgcttttacagcattgggatttaatccatgagcttctaaccctgcactgcgtacatcccattcattattatttagatatttttttgcccatccttcagccatttggctacggcaagagttacctgtacataagaaataaagtgtttttttagacatgtgtaaaatctcctttgtgatgtgttaagaaataattgataaccaaatatataaaccaacaagcgtaataaacaatgttgggatggttaagataatacctgttttaaaataggttccccaagaaatcttaactccttttgtcgaaagaacgtggagccataagagagtggctagagagccaataggtgtaatttttggtcctaagtccgaaccaatgacatttgcataaatcaaggcttctttaattgtacctgttgcagaagttgcatcaatggccaaagcatcaatcatcacggttggcatgttgttcataatcgatgaaagtatggctgcaatgaatcccatgccaatggttgcagcaaataatccatggtcagccgttgcttgaatgaggcttgctaatacttcggttagcccaacagcacgtaatccgtagacaacaacgtacataccaatggaaaagaaaacaatcgcccaaggagctccttgcaatactttttttgtttgaactaccgagctttgtcttgctattcctaagaagaaaatagcaataattcctgcgataatagacaccggaatgtcaaagaattcaccaataaagtaaccaacaactaaaacgattaagacaattcctgataaccggaatgttttctcatctttaatagcctcaaccggtttctgtaaatcatccagattgtatttcttagggatatttttacggaagtatagatataagacggtaatacttgctaatagtgaaaataaatctggaatgatcatacgtgaagcaaactctgaaaaacgaataccaaagaaatcagctgatacaatattcactaagttacttaccaccagtggaagagacgttgtatcggcaataaatccacttgcgataataaatggaaagaccattttatcttcaaatttcagtgcacgtaccattgcaagtacgataggtgttaaaatcaaggctgctccatcgttagcaaacaatgctgctacaactgcacctagaagagaaacatagacaaacattcgaatgccattgcctcctgcagtacgcgccatatgtaaagctgcccactcgaaaaatccaatttcatctaaaattaaggaaataataataacttcaataaacgttaatgttgcattccatacaatttgagttacatccagcacgtcatggaaatcaaccacacctgctaaaagagctaatactgcgcctccacatgctgaccaaccaatagacaagttctttggctgccaaatgacaaaaatcaatgtcactaagaagatgagggaggctactataactgataccactttacagacctcctattattagcaacaattaatacgtaaaccttgcttttctagttcttttaatcgttcatcttcgcttggtaaagaatcgagtatatcaaggacaaactgataatagctgttttctttatttaaggaatagaagatccaatgtccttttcgtctttcacttacaagttcgatatctcttaatttacgcaagtgttggctaatagccggttgacttgctttataaatttcaactagctcacaaacacagcactcgttattttggagcagcttcatcattgacaatcttgtcttatctccaagcaacttcagtatctgtactgctttttccacttctacctgcgcttttacatccattatgactcgcctccttattttgaaagataattatgtaagtattttatgatatactcaacaaaaatatacatnnnnnnnnnnnnnnnnnnnnnnnnnnnnnnnnnnnnnnnnnnnnnnnnnnnnnnnnnnnnnnnnnnnnnnnnnnnnnnnnnnnnnnnnnnnnnnnnnnnnttccttgatttatctaaattttccagatatgatgaatacatcaaaaaaaattgattaataagaaatgagggttataacagtgagagtcaacaactctggaaacttatctgttaagtactttcaatcgtatttttatttagttatgaatactcaaggtatgaatcataaggaagcaagaaaccttatttttcagcgcttttttcatcaagatcctatgttaagagggaagactacatacatcaactttgaaaaagcatacaaaagctttgaattttaaatcaaaaaaaattgattaaggagaatgacggtggaaaaagtcaacgaggtaaagcaaacatttaagcaatatgaaaaaaaatttaaagctcttgccgatcaaaaaagattagaaattatgtatgagctttgtcagcgagggcagacatgcgtatgtgatttaactgagttctttggaatgtctcaatctaagctctcatatcacttaaaaattttattagatgcaaatctcattgttaaagaaacaaaaggaacatggagctattacgatctaaatgataaagaagtgaatcatattctttctgaagagctttgctgtttatttagaaaagatacgagtaaaagctgttgttaggaaatatatttgaagtctcaattgattatttgttaaaagatacagtcgtacaagaaagcaacactgaaaaaggctattatgtaagtaaggaaatggctgaaggatttttagcctttcaagggaaaacacacaaatatgtatctttgggagttagtttgctcatcctatcgaccataccttattggttgttcgatcaaaacaaagaactttctacatttttaattattctaattgctactataggagtgggcgctctcgtttctgcggttttgttaggaggacatcaatataaggtacttagtaaagaacctctgttactggatcatcattatgtaaaagaattatctctaaaatacgctcatactaaaaagaagtatgctgttgtaatgattgtaggttcttgtttatctatagaatttaaacttagtcaaaaaccatcgtttttggggaatggtttttgacagttgttctttctcagttaacgcgacttatgataaactaattttatcggaattttcataataatggaactcccattgttccgttaaagggccagtttaaaggaattaaattaaattggagggaatagaaaatggatgcaaagacacttttgttacaacaatgggcaagctgcttagatgaagaagactggtttccaccacttgaaaaagtgctagaggatattactcttgaacaggcagtttggaaaccagctgatgggacaatgaattccatttgggaattagtttgtcatttacttttctatgaaaagagacttctgatgcgatttcttggtgaaacagcgaatgaaccacaggcagaagataatggatctacatttcgattaccaactgagacggttcaaaattggaaggaaacaaagcaagaatacttttatgttcatcgtgaacttgaaaaaatactagcaaaatcagaacatgaagatttgtatagacagatccctggagaacgatcattagtgcttgaactgaagagtttagcaatgcacaacgcatatcatattgggcaaattgtattcctaagtaaaatgcaaggagcttgggcagcgaaacgcagcttttaaaaaagcttcattagctttacagttatttcattatggagggctttaatggaataagaacgggaacatccaaatcggacgttcccatattttatacctaaaaaataattacatctcaaaaaagctatgtctttcaactttacaaactctaaaagaaaaatttttataccattccgttttccctttgttttgtgctgcaatatgagctgagttttctttccaagcttttatcgactccaaagaatcccaatatgaaactgtgattcctaaatctttatctctggcactttctactcctaaaaatcctttctggttagaagcgagttctaccattttatctgccattactccatatcccttatctccttcagttctctgcgaagcaaaaatcactgcaaaataaggtggttcaggggtttttgcgattccaaccatatgcatttcctccttgaaaagtaaaatcaaatccaatatagtaaattttaacataattcagattgtcggcactgaaaaagatcttcgtttaaaagattcttttaactgctcattcaaatgcttatcctaccacatcggtctagattagtaatatactggttttacatctataaaaagaaaaggggattagcaatgagaaaacaagtatatattatccatggatatggagcctcaccatctaatcattggtttccgtggctaaaagaaaaattaatagcagataatcatcaagtttcggttcttcacatgccaaattcgtccgatcccaagaaagaagaatggttggaaacattggctaataaaataaagaatttagatgacaacacttattttgtagcacatagcttaggatctatcacgctattgaactatctagaaaaattaaatccgttaccagggtttggaggatttattcttgtttctggcttttctgaacgattatcatctttatcttcactagatccttttacagttaaagaagtggattatcaaaaaataatttctgcaactaactcacgtgctgttattgctgcaaaaaacgactatattgttccttttcaattaagtcaaaatttatcaaaccaattagatacatcattttatcctgttgaaaagggtggtcattttctagaagatgatggttttattgctttcccattggtttatgatattttaaataatatgatgaaaaccgtataaataatgagggaatagggtgataccatgaataaaaacagaataaagatactcgcaatctcagggagtttgcgtaaaaattcttccaatacaaatgttctgtatgctatttctaatctaagacctgaaaatattgattttcaattttatgaaggattgggacttcttcctcattttaaccctgaaatagatactgatagtcctcctgaccctattaaggacttacgtaaccaactgaaattagctgatggtgtaataatatgtacaccagaatacgctaggggagttccagggtccctaaaaaatgctcttgattggattgtatcctcgggagaatttgtgaataaaccagtagctgttattagtgcttcttcacgtagttcaggtggagataaagctcacgagtccattttacttacattagagatgattgaagcgaaaatcccaaaagaaagcactttacgaattggtgctgtaggaaccaaaatcaataataaaatcgaaatcttagattctacaacgagtgaacagttaaaatcggtattgaattctctcatttcatctatcaagtttaactagctagagtattcctccttgtgtctataaatatgagaagcctttgtctatatccacaaaggcttcttttttattaggtgtaatttattagaagggaatttagttatggaaaaatatcttctcgcactaataaccattgttttattattagttgctatcggcagttttgtaataccaaatatcatcaactatgcttcctatttcaccaactaaatttaaggtgtagatattaatttagtttaggtgaaaacacaatgtatctaaacaaatgtgtcagaacatctaacactccgattgcatgtgatcctattttaatcaatattgtatttatattaaagaaaagagaggttttttaattggttactactgtggaaattaaacaattaaaatctattgatcattatatagacagtctttcagaattattaattgaaactgtaaacgatggggcatctataggatttttgccacctttaaagcatgtagaagcagagcaatattggaataacacattaaaatcagaagtagttctatttatagctacaatcaataatgaaatagttggaagtgttcaactttatctagatacaaaacaaaatggtgcacatagagctgaaattggtaaattaatgactcatcctaaattcagaagaaaaggcatcggacgtttattaatggaggcagctgaaaatagagcagaaaaagagaatagatcattgcttgtactcgatacaagagagggaggtccatctaatcatctatacagttctttaggattcatcgaagctggacgtatcccctactatgctgaatcagcaaatggtgatctacatacaactgttttctattacaagttttctaatttaagtaaaaatatttaatactgtttgctgtagctgtttatagtcaaagtaggatagcctttaatactaattaaaggcctttttatgtttacaggcacctagaattggttttatgttaactagaaaggaatagttaaacataaactctaacaccggtgtatatagggatgttaagtataggcgtatctttttataagggccaaatatatgttgaaggttataaaaagtggcagcttagtatgagaagttgccacttttattttacatgatcagtaacattatttgtgatacaagaatctaaaagagaatccttaatttctgctttcatattccatgattttaatatttctgtttcaaatctttgtatatctttaaagcttgttcatatgtattgttgttcgaagcaatttgataattttttgtactatcatctgtatgaaaaattcccttatcatctatcattaaagttcccgaaattttatcatgatagacaaatattattgatattgccttatcataattcaattgttggttggtttgtcctatgtattgaagttgattataagaattaacaagtgattgaacgctttcttgctcaactttattatatccttcatataaactttgccctaaaccaatatcaacgtaatctgctttgattccctttacagagttattactgcatccatttataataaggactattattacaatgctaagaataaataatgatcttttcataattttaatcccttcaaattattagtattattaatttttaagctttaataaatacgtcactatcttttttacttagacctatatatttaaaatacctcctaaaatttttttgtattattaatggtaacatttattttttaatttaaattactaaagtgtaaaactaattcaaacttcccagagcgcacattatggtaaataagaatgtatatattactcacttaaaaacaaagatttcattttaattttttctattttatgaaataattgtatgtttcatttaaaatatgacaatcaaatttatagggagaagaaaaaatgaaatcagtaaaaaatattgtattttttgtgctgttgttatttattatttcagcttgttctaattcaaaagatataaagctttcaaaagcagacgctataataactaataacaaagaccttgtaggagaaactgttagaaccataggagaaggtaagagtcaaacaactgtggacacggtgttatactatacgtttgtagtaaagaacaattctaataaatctatatctaatgaagacttgaaccagataaaactaaaaataaaacctaatcaagaattactatcggttgtagaagatacagtaggatctaacctttataatgttaacaagagtaaaataggagggggccaaggaatagaggagattccagctcatggtactggaaagtttactatttattataacttaagtacagataaacaggggaataaactaccttctatacctactaaagaggagttaaaaagaataaaggaaaatgctttaaaatctacacttattgtctcagaaaatggagaagagattgctcacttcaatttaaataaaaattagtatgtaatttagagatacatagagtaattaaagagaagaccatttaaatggtcttctctttaattactacagataagctttattatcttaatcaaggatgcatagagtatattacttgaacctaattaactttagatttttcattcatagattcgatcctctagaaaagattaaaaatattattgttttattagagcagatatacttattacaactttgtttatttccgacaatctcaattatggtaattataaaaataataccttgtattaaaaggtattattttttatagtctgtctagatttgtagactcatatacatatacctttaaaaataaatgttgtcattcactatattcgtagaaaataaccttgactccgttttatatttcgttaagtaaacactaaattacttcatttattattaatgttttatcatttactctaagtgacgacaaatagatagtttttctacaatagatgtaaatagaaaagtacttataacgaaaatattttactatttactcaaaagaattaaaaagtttttaaagttaacatagatgttgttgcataagtaaaatatttacgaagagataaggtatgaaacaataaatacataaaagaagggatcagcctattgaatcaatatctaacatataattacaaaaggtatttctctaataaaataattaagaatgtattaaaaaatttagttattagaattcaccttgtattaaaaggtattattttttataatcaactaagaggtggaaaatttggaaattagtagagagatcttaaagggtcatattgatacgttgattttgtcgttactttatcaaagggatatgtacggttatgaattggctaagattgttcgagaaaaaagtgatgaacaatttgaactgaaagaaggaactctttatttgtctttaaagagattagaaaagaataattggatttcttcttactggggtagtgagcaaggtcctggcggaagaagaaagtattataagcttacctccttaggtaagcaaggctttgaagataagcgtttagaatggcaatttataaagaaaatgatggattcatttttatggggaggaactaagtgaagagaatagaagcatttgtggattctatgtatttaaatgtagacggagataaacaagaaatcgaagaattaaaagcagaaatgaaaaatcatttgtttgaatccgttcaggagttaaaagaaggaggaaaaacagaacaacaagctattacaattgcgattcaacggtttggtgaagaaaaagaaatgcgcgctgttattggacaattgtttgagatacaaaaaatatttgcaaagcgtgtgctttacatagcaatagtctgtttaatattaacaatatcaatgggtagttttctttggaaaattgacgattcaactgctcaaggattatctgaaacaagtacattaatatctaaggaattagaaaacaaagacgttatgaccttcagtatgaaaaggaaaattgaaactttagtagaggatacgaattatatatctgaagtcactatctataattcaaaagatataagaagtgttagccaaaattctggtgattatcattggaaatcacagaatccagattttcaatatcagagaacgatttgggctccaaaatggctaggtgtggattcttccacgtctggaaatggaaatgaacaatggtttgtactaatagagagtagaagttttgatcaattacaggtaattgtaatatttatgggtggagctatttactggacgctgttcactatttgggcaattattaatgcacaccatcaaaaacggttacgaattggatggatttttatatttatagggcttaatgttttaggttatttactttattattttacaggaatacggagcgtttcttctaaagagcatgaggatttatattaagattctgtatcctctaccttaaagctaatatatacacttataaactaatatggtaaaattactcatattttgtcgttaggaacttaaattttgttggaggttacaaatgagttacggcgtttcagtattttttatattagtgcttatgtgtattattgcaagtcagtcttacttaccaaaatggttaaagtggttagttggtgtctactattctttaggaatattactttttagttatcttcaaactcgtttagccgataaatggtatgtacatactcctgttctagacgagtattgggatgcaaattcaagattaacagatctatttgctgctgtgttctttatacctgtctgcatattttttttcatactatattataactggttcaaaaaactaaaaaagcccctacaccgtgtgtatttgggaattagtgtggttcctgttttacttataggttttgtatgtttctttatgtttgaattcttgtatgggtatagaccttaaaatcatattgcattttactactccaaaactaagcgtacaaaaaataaacctttgctaatataagcaaaggtttttcaaatttattggaatagggggaatacgttattagtctgtctagatttgtagactcatatacatatattatacctttgaatatttttctgtttaatagctgtccaaaccccggtatggcaatgctccagagtaacttttgtaacttatcttcattcatcaataccacttatccaatcaacattattttttctgtatcatacttttaaagtagacaatttaaaagtaataaaaaagcaaatgtcttttctaacttaaattgtaataaatttattatttacaatttgctatttgtttatttatggtttgtggtttaaacgatatatgttttaaagtttttatctcccgacttttatttataagctatttcattataaatattaaaacggaaacatttcagaaacattaaagttttataatttaaataaataggtaaaacaagagaaaagctatcccagtggatagcgagagaaataaaaaatgatatgcaaaaggttcgtaagttaatatatataaaactatattaagaaggagcattttaagattaggtatagcaacagttacaaatcgaccatccacccctacagattacggtttttcaaatggatgaagcaaccttaggcattttaaagaaagtacataagaaagcttatagttgaaaacattactcatatggaacttcacttggccacagagcaaatctcagtatgaatcttcccgaaaaaacaggaattcttcttattcttatctaaccttatttagtgacaagcttgtagaagctatgatatgttagcatctctacatatgatctaaaaataagaggatgaggtgtttgaatatgaataaaactgaactagtagatgcagttgcaacacaagcagaactatcaaagcaagatgctaaaaaagctgtggaagcgttgtttgaaacgatttctaacacacttgcgaaagaagaaaaaattcagttgattggatttggaacatttgaagtacgtgaacgtgcagctcgtacaggtcgtaaccctcaaacaggtgaggaaatgacaattccggcttcaaaggttcctgcttttaaaccgggaaaagaattaaaagcagctgttaaataaatttaccttaataagcaagtccccgtcccctctagagctagacttctaaaggggactatttttcatggtgaaaaacttctgaatacctacacctacatattatctaatcaaggtttctattttcatgagtcgtcgtcttagagttagaggtaggttctttgccaagtctaggcttccaatttcctaacttattttttaagtactcctttaaaaaatcacgtttcttttttcgtcttttatctctgtttttcataaaagctcaccacctttaggttactgttacttaatagttgcaatttatccttattataaatatggtgaaaaacccactctttatgctgaattataagtaggacatcttactactagaaagtacacttttttcggacagataactcattaatgtctgcaatttttgtattttattgtgattttttgatatgttttgtagaaaccgttttcattttaacttatattgctcataatatcttttgttggctctatctttttattatggacctactaaatttcctagagactgaaaaatttcgatgaggtgagaagaaactatgtcaatgatagttcatccagtaggtcaaaaagaagacttactaaagtgtattgtgaaaaaaagaaaagaattaattgatctaggtagtaattatggatttttagataaaagaacaattaagtgtagtcaagatttagacaagcttataaatttacatatgaaatcttattctggttcaactaacatgtttttagataacggaggagatctacctagaatgagacactcttatggtaattataaaggtagtgatttcaaatatgaggtaaaagccgttgagtttgcaagaagtaatattcgtatctgttctgcccaatggattgctaattcaaatctagcaacatttggagtatgtactgctttagttttagttggtaacggaactaaggcaggttttgatgcccttcaaaatttccgacggttaacaactcattcgtgaaaatctgtcttttctaacgctttaaactaagtttactttgtatatgtaaaaagagaaaagccactgggcctaatcagtggtttttcttatgtatttaagttatatgtctaagatcaaaagatcttaatttttaagattttcacatcttgaatgaatgctctttcctttgtagatatatctaatttagctaattttacaattttatctgtatccttaacagattttatcagggcaaagccattaactattttattattttttaatactgattagtccaacttaaacatttgtaggttttccggcttgttttttaacattatagttacctcttttttagtaattcttatggcattaattatacgtagtctagtgtatatttctannnnnnnnnnnnnnnnnnnnnnnnnnnnnnnnnnnnnnnnnnnnnnnnnnnnnnnnnnnnnnnnnnnnnnnnnnnnnnnnnnnnnnnnnnnnnnnnnnnntgagtagtctgctcatgatgttatttattattcatttttataattattaaataaaaagaaacagacttgttaggaagtctgcaactgcaacaagaaattatacaacaggtattgtatatgatccaacgaactttagcagtctgccctattgaggagattctatactttattaaccttatgttaactaaacatgtacagcgtaaaaacagaaaaactactgaccatgctccagtagttttttctgtgagtagtgagtaattagaagttgtttttgaaatcatatattgacctctggattagtttgctcaaggtgctatttattatacgattgtaatttttaacatttaaaataatggatacataattagttttttaagataattagattgttcccaaggtagtaaaagtcattttaattaactctttaattttgagaattcgctttatgttaactagctctataaactacaaataaagctagctgtgttaagctagctttatattttcatggcgtttttctataagtttttcaagcttttcaattgcttgtttatctttaagcaattcttctttattctcttttactagatcttcaaatgattttgtatgcttacgcatgttagcacttctttcttttgtattggatcgctttaactataccttatctaggcaattttaggtaataaaacaacttcactatttacaatggttcccgtacaaaataagtatatcctatttattttctccaattttgaatttcgataagattcccttcagggtcttttgcaaaaacaatagttataatagcaatatctcggtactttttcaactatctcctccactcttggtacaaaaaccagaacttcatgagtgataatactaaaagacgaaaagaaatgatttaatagtaagaaaatctgacaaagtgctcaattgaaaaagcccgaataagggacactttttatgtnnnnnnnnnnnnnnnnnnnnnnnnnnnnnnnnnnnnnnnnnnnnnnnnnnnnnnnnnnnnnnnnnnnnnnnnnnnnnnnnnnnnnnnnnnnnnnnnnnnnatataaaggatttggtttcttataatgcccactatgctaactaaagttttatagcatatacagcctgaaaacagaaaaacctactgcttatacagtagattttactccaatatcatccaatgcattgaaagccttagaacttcttgagtagttttttaaactatcattaattattcgttttataatcataaaaaaaagaaacagatcaaaaaaactgtttcttgtaaaattccaatccagattaatacattaccctttcgattaagaaataaaacataattattttatataaaaaaaacataaaatgcagaaaagagtttgttagagagtctgtaataagaataaatctatttccagcatgacaaaccaagagcgaaggacgtttgaccaatttttactggagagatatttgaatatcagagtctagtgcttgagcaaggttcgatttaattcttatattttcaaatgaaagaccaagttgaatagctgtttgggcaacttctggtctaataccagataaggtagacttcactccaagtagaccaagggcatcaattaattgaaatatttgatgcgcaaccattgtgtcaacaataacaacccctgataggtcaatgtaaaggtgagcaatacgtttatcaccacattgctgtaacgtactctctaagattatttttgctcttgtagtatcaatatctccaaccagtggcaaaagcgcgatatctttttttatggtgatgaccggtgaacttaattcatgaatcatttcttgttgtgcttttaattgaagggaggaggtttcctgagctgctgttataaattttaatatggtaatgtcaaaaattcgaatgacattttcattccatgcgtttatcagtttaggatcaataaatccttcatatgtacttacgaactcttctatacaatcacagtattgcttacgaatacgcataaactctttaataacataggaaataggggttcttatatgttcattagcttttgcaatcttattaatccacacttcaaatgtatcaaaaaaggttttttcgtcttctacgaatacattacagatatatagacgaaattcataatcttgttcttttaaggtttgaataacttcaggatcagtagaagcataaactcctacagcctttttttatctaatgaatcgtaccattcttccgttaggcgtttagcgttatccagtaaaaaggtacgtaactgttcattgtgattcaattttgttctcctttcacttcatttatttactctaatactaatcgattaagcgattagtatacttacaaaatgataaattaggaaggatagtagagtcaaatattctatatatgtaattagctgaacaagctgtctgtgttgttccaaaatggcacccgattgtggagaatttttataaataaaagaattctttatatgacccatttttcctagtacgctatccaacatggtaattattgtaggtttttggtttcattttccttagagtatattgtgggaaaaatttttttgtagtatcctatcatcgatttggatgccatcgaagtaatgaacctagtttattgtttgcaaagaaaattcctctagttgtttctaagacaacattttattccaaatcaaaaataagggagggataagatgtccaggttttatagacgtatcgttttatctgtactttttttgtttttggttacaggaatgatttcaccggcacaagcgcagtctgattcaaatggcgggggttattggctcccaaacaacaaggagaagattgaaaaggcaactaaacttatgaagcaaggcaagtcagttgaagagattgggatcaagcaagatcagatccagaaaaaagaaggcatccagacattagataaattgatggaggaagaccagcaaagtgacacaacatacagagcgaacatagcgcctccgattaagacagcagccggatggacaccccctgatttcgactatgaccatatccttactacggaagaatgccagagaagtccagacagcagttcagaaacagggtatattaagaaccggtattccttctgttggtcccacgtcgccacatatcaagtcccaacaaaatgcattggtgggttctgtttttacgaaggcgttcaatttcaattcactgaaataggttatggctccaaccaaagccgaaaaatgagggtctattatacacttgatgatatcctcgttactcatccatccttgaatggagccaagttgaaaattgatatggtatgtgaatccaaggtgaacgcaggtgactgtaaagaggatcctgactttccaccgacggaacgaacaatcgcccaatggaaaaacacaaacttcagcacagaaattttcacatcagaagcacctccaccaactgacgcaaaccctgatcagttagggtacatggaattttggccaaaacttacccttacacatgcgccaaggaaattcaaaaagagcattgatggtattaaacagaccgttcgttacgattctgcaaaatatatgtttgctttccctgatcaatatttctggcaaggagccgtattcagtaaagccacaccaatcttcaatgttccggtcacaaagccagaattttcgatgttagccgaagctggacaacattggaagtttgcgatggatcatccagatcagacgaagcctcaaatggttggaaagaaaataccgggagctgtgggagacagcacactgacacggatgtatacgaaacgtcatcaggatggatataatcgcaataggaacaagacaagaaggacttgtgacagggaattcggagatgaggatcggaccggcaaacagtgtgacgaatatccgtttgcttccacctgggaaggttcggcgaccaatggatcggataatttttcagtaagaatgatttcaagcgaatcgaacggtgctgcagggacatggcttggtgcctggtacgcctatgacaggattctagatggggatactttcaatgtgcaggttgaagcccctgagaaaatagcgacgatccgatcggaaggccagcctcaggacggacaggataaccgatcaagtgataacttcacgatcgggaacattccttcttatgcgaccaagttacaatggaaaatcgtcgatggtcctactaatgcgaaattcgatgtcatgaaagacatcagcttcggcattgacgaaacgatctttaatgaccttacagacggatctgagacagaaatcaaaacgagcgaagatttctacgtcgctagaccggaaaacaccgatggagaaagcttcactgtcgaggtttatgccatcccataataataacttagaggctgttctctaagtatgtaacacttaaaggcagcctcttttaaaccattagagaatcagatccaaacctactgtttcaacagctacctatggtcgattaaagtaaagaggattaactatttagttgtaatatagtggttggtcactataaaacaagattttaagttgaaaacaacaggtaaatgataaataattatttatgtgggaaggtgttcaattatgaagaagtctacagcagttctaccagaagagtggatgaggttagttaaagacgcaatgaatttaaatgtgagcaaagaagaatttaaacagtttctagaagaaaaatctcaaaataacactacagcaaaaaacattagatagcttctatatctaatgttttttttgctgtcactaaatttatttactacctaagaatgcttttttaacaggcatttttgtgcgtttgaatagtaaaaggctatcatatgaacaatgtataaaaagctgtatattgaagaatatctatcctctcaagagtctttgtcctctaaggaatctatggttaaatttaaaccaagaagtgcttgttctaggtttgcttttatagttattttgctaaaatcaattccaagttggatcattgtttgagcaacttcaggtcggataccaattagtatcgtttttaccccaagaagacctaacgcctctacaattttaaaaatttgatgggcaaccatggtatctacaatcatcacgccagagaggtcgaatagcaagtgtgatagctgtagtatatttgctttctctaatgtttcttctaataaaagcgtggctctttccggatctacctctccaacaagagggagtacagcaatgccttttgtaattggaactacaggtactgataattcaaggaaagcactctttgctttttttaatgtttcatgatgaatattcacataagttaaactaaaagcaaaaacagctttatctaataagggatcaataattgagcttaattcaaatactgtatctattgacatattattcttttttatttcttctttaagtatttcccatatgaatgttcgataataggttgtatcttctaaggcctcattaagagaaacccctaaatttgatgcaaattctcctgattgctttccccatttcactatctgatctaacagtgttttttgatcgagcttttccatgatagcccgtccaaaatagctgatgaagtttgctctcaactcaataatctcttcatctgtaagattaacgtcttttacttctttaaggtcagcccttctatgtacgtgtaccatttttgcaatttcatattttttttctaaaattttctctcctagaaagtgtagattatccattgtagtctgtcctccaggcttaacttctgtaaaaaagttgttttaactattttatcattttaaaaaagagtacgtaattaagtatgcaagataattggatgatttcaaaggtaacaaaagtcattaattccggtaacattgattatgttaactaactttgtataccatatacggcctaaaaagagaaaaaactacctttaactaaggtagttttctctacacacatttgttgttaggacgatgttttgtaacatcatgagtagtctgctcatgatgttatttannnnnnnnnnnnnnnnnnnnnnnnnnnnnnnnnnnnnnnnnnnnnnnnnnnnnnnnnnnnnnnnnnnnnnnnnnnnnnnnnnnnnnnnnnnnnnnnnnnnctttttatgtagtgacccttattcgggttatagttcagctaatccaggtatttttttattaaaattgaatgattttatcgtatggatattcaatttttatcgaggtttggtctttggttattcaaattcacacgcgatttttcattgtctacgagatgcttaatttctttaaagcttacaaaacgtttattttgttgatctaaaagtcgaaaacgaagagacttcaagcttgtgcttagtgtaatggttgttgctttctgtaatggtggcgtagactcatgcgccttttctaaattatagtttggaactcttggagccaaatgatgtacatgatggaaaccaatattacctgttacccattgtaaaactttaggaagcttgtaataggagctaccatcaaccgcagccttcacgtaatcccactccttttcgttttcaaagtaggaatcctcaaattgatgctgtacgtaaaatagccaaattccaagtgatcctgctacaaagaggatgggagcttgaacgagcagaaaagcttgccaaccaatgccccaacataaaagtgcatacactgcaacaattgagaaattggttaaatatgtgttcaaacgttcctttcgtttcgcgtcttttcggttcaaacggttagaaacgaagaaaagatagatgggacctaatccaaacataacaattggattgcggtaaactcggtaagccaaccggccccagtaggaagctgccacatattcatcaactgtcatgacccacacatcaccagttcctcgtttatctaagttgctgctcgtggcatgatgaatcgagtggcttcgtttccactgttcatacggaaacatggttataaccccactgattgtaccaaggatattatttgcttttcggcttttgaaaaatgattgatgacaacaatcatggaaaataatgaagattcggacgacgaacccggctgtaacaatagctaatggcagtgttagccaataagaaacggacaaacttttataagctagaaaccaaagtagtaaaaacggtaggaatgtgtttattaattgctttatactcgatttcgtattggatttttcaaaaggtgctacattttttcttaattcagtcgttttttgtttgctcatgggttcctccttacatctttaccatatttaatatacagctcttctttacatttatagtagaacatagtagctggtaacaaaagatataaacgtcaagtaactagtatgacaactgtcatacatgtgtgaatgtattttcttaataaaaggaaaaaagtgtgttggacaaaatcagtttgattaaagcattaggattattgtagtcctagctatgtaatggtgctcataaacctgtatcttaccaacaggttttgagtcactattttttaaatatattgcgaacaaaaaactacctcctctaaatgatgactagggccggtagtttttcagagctatgaatgttcaacttttgttcattttggtataaaaactctttaacaatttcatcatatcacgccccgatgttctagacagtttatcattatcttcatgcgtactcacataccagctgcccttgtcatcttcatttaatctatataccttaccgtttctactatctgtataaaagtctccatccttcagtctcaaacgatcccccctctaccacgtatataccctgtattgtacccaagatatccattttataaaaaatttcatctacacaaaaacagcagggctcttaacaagcttactattttgtatgtaagctacatatgtggaaagtcaattgaatttatttactcctagtagatcttaaattaatctttttacaataggatttcacgcttgaaagggtcatttttcctgtatttgctatattcggttttatatgttacgattaagttaattatttttgttcggtgtaagattaagagaagagaaatctcttccatagaaattttcatcttaagatagtatggttggacaagggtagtaatacaagggtggagtattccacactaggaggcaatattatggaacaaggtacagtgaaatggtttaatgcagacaaagggttcggttttatcgaaatcgaaggaggagacgatgtattcgtacattttagctctattcaaggtgacggctttaaatcattagatgaaggtcaaaaagtaacgtttgatatcgaacaaggtcaacgtggagcacaagctgctaacgttcataaagtagcataattaaaatgagtaaaaaaagactccacctgggagtctttttttacttttgattccgttagctagcaaaaaacgtattatatctacttttaaaatctagatataatagaaaaaccagagttttaagtctggtttctagataaaacgaacggtacaaggtatggactagttataccacatattagaaatataaagcaaatatcgcgtgtttttttggtaagaagtttaatttcagttaaagaagtgccagaaattttttagggatttatccaaaaggcagccatacattatttttgatggggattaggtgacgcatctaaaagtcggttttcaactctcattttatggccacataaaggacacttttgtcgattttcataagagaagttttttctcatccaaccattacactcttctgacttacattcccaaatcattgtttgttcttttggtaagggctcttgatctttcttccgatggttataatacatacttacatcatccctcctcctaagtagtataccttttaaaaaagaaatagtaggaaccatatctttctaaatcacattactcttaatgggtactataagaatttataaatacacataagcgcggataaaataaggcatgaattcgtcttgtacagatatgttagaacaagatattcgtggatagtaacactgatttaccatacacaggaatgaataagcagaatctctggttaaagagtacctttctcatttctgaattaagtaagagaaggagcacgaaacagttgaaaaatttttctgatttccatttaagtaaggacattgaaaaggccattcataacttggggtttgaagaggctacaccgattcaggctgaagctattccgatagctatgacgggtaaagatctaattggtcaagctcaaacaggtactggcaagacaacagcttttggtatcccccttatagaacgagttgagctttctgaagaagcaattcaggggattgtgctaggatcattaggatatgattatatacatcataatgaggttatcatgcaaaaacttcaaaatatttataagtgaccttctaaacatggaaatgatggaagatcgaaaattaaccgttgcccacacaatgaattatgcattgtattcatcaatatgaacctaaattagatgagagagcacaatgggaccgatctgtccaaaagaaagggaagtttactcaaaaaaaaatttgaatagtgacgtaaaaatagattctattagataggaacctatatacctttttcatataaatgcaacctacgcgctagaatccgtaaacttgtttacaaataaaaaatgacgccgtttaggcgccatttttcattgaatggggaggacacaccctatgcacgggcggtactattaacacatcgtcttgatttgataatacctagtgttcaaatttaataaacctttgctgatgacgatttatgcagaatatctgcatggaggtaagtctacacataatctggatttttgcgtgtaaataaataacaaaaaaacaaagttaaattgtctttctgtacacctcacctatggtttatgtcatttaaaagagattattttttctcatattctaaaggcaagggggagaaatcattttttgtaactaattgtttaaaaactaaattcctatgctctctctcttctaataaatccctaatctctttacataaatgaattcccatattcaataattcgatttcttgtgacatccgatttgctccctcttgaataagtttataaaaaattttacgtaaaatgaaaaaagtctttgaaatgggacaataattatctttgtgaaaggatttgattgaagaagcagagtatatatgcagaaataaaggcaaatgggtgtttaatttataaacttatattactttataaaaaccaaaccaaggcaccttttctatccattgtagatacacgaggttatttaacagcttgctttaattccttccctgctttaaaggaagcaatttttgaagcaggaatctccattgtttcacctgtttgagggtttcgacctgttcgtgctgcacgttctcgtacttcaaatgtgccaaagccaattagttggattttttcttccttggcaagttcggcagcaattgtttcaaatactacattcacagcttttgtagcgtctttctgtgttagacctgcttttgttgcaacggcacttattagttctattttattcatagtcaaacacctcatttcatttgtttaagcaagtatattagaagaataacctagcttttatgcacttgctctcttataagattagataaaagtaggtaaataccctttaattaatatacaatatataacaagttctttaatacagttaattctctatagctataataaacgcatgtcccacagaaacttaaaataaaaagaactcaatcagttggggagtttattggagcttcttctcttagagccacaggtaatcaatattaaaacaacaaggacctttacttaggggtcttcttttactgataattcacattacgtaaaatcatttataataaattgtacttaataaaaaagaatcctttgctgataggcaaaggattttcaaatttatcggaataggggggaatacgttattagtttggacagttttatagnnnnnnnnnnnnnnnnnnnnnnnnnnnnnnnnnnnnnnnnnnnnnnnnnnnnnnnnnnnnnnnnnnnnnnnnnnnnnnnnnnnnnnnnnnnnnnnnnnnnatataaaacagtaaatgaataaactcccttataaaaatcatggttttatcctttactctacctgacgacaaataagatctttttctacaagataggtaaatgatataactatttttaataaaatacgttaggtattacttatatttataacattaatgttatcattacttaatatataaaattaatgttatatctcctttgtataaatagatattttctatttatacaacattcactgttttcactttgacgtttactagtataaaaatgtgtatcttaagatacacaaatagaaatttatcttttattctttaccttaatcactttttaataaaaataattttccgaattaatttgaacaagttggttaaaaaggttaaattattcatatttatcttatctactaaaaattaagccgtacataataagatagaagaaactcgtcataaaataagcatgtatcttaaatagtaagatacatgcttatttaacaaaggtcgagtcagttattaatctttccagttctataacttgatatacattatagtaagggattttgcagcgaatgactcattatctagcttgaacagagttcatttcgctaaagcgcgaatctcagcatttatcttactgataaccctttaaatcatcaaaataagagcttatgtttgaacattttctaaagactatgatatgttttacatatccacactgtatgtacagtaagaaatgaggtatttaaacatgaataaagctgaattaatcgatgcagttgctacaaaatccgacttaacaaagcaagattcaaaaaaagccgtagatgtgttgtttgaaacgatttctaatacacttgcaaaagaagagaaaattcaactacttggctttggcacatttgaagtacgtgaacgtgctgagcgcacaggtcgcaatcctcaaacaggtgaggaaatggccatcccagcttcgaaagttcctgcttttaaaccaggaaaagaattaaaagaagctattaaatcactataaattgaaaattaattattgatcacatattagatattactcataccattcctgggcttcttaatttattttattctaaaaactctcaaacgtttgaaataatcatactctctacgggtgaagtagttgattgttgtaattgggatgaagcttgtgagattttacataaaattattaacttgtcccaaaacaaggtttaaaatagaaccctctttttgaataaagtttgtaagatacactaaataattttttttagtaaagtggatattatgaaattaaaaatagaaaaaatccactcaaagaagcctcttttagataggaagaggcttcttttgattttgcactataaaatgtctaaccatattggttgataaacccaagttcttagcttcttgcataagaaatatccatttttagtttttgtctaacacctggggtacatttcaaatgagataggtttttaaatcaatatttgtatgacaatttataatattatagaagctgtatttacaaatttcattaccgtcaacaacaaaaagctatttcaaagatgatgaaatagctttttgttgttttatgagacagaataggtgaccttaaataaggttataaaggttattatacggtcttttgtcatacatttcatcatgaaaattctaacatttttaaattttccctatcaaatactctgctctacaactctgttatttgatgaccattcaggaaattgctaaaaatgcacattatagtttagagagctaactttataattaattttaccgtgttaatagttaatttatataaacnnnnnnnnnnnnnnnnnnnnnnnnnnnnnnnnnnnnnnnnnnnnnnnnnnnnnnnnnnnnnnnnnnnnnnnnnnnnnnnnnnnnnnnnnnnnnnnnnnnnatttcatactccttattattctcccaccttcgttttcccattcgtccagacttatagtgtcatttggatcaggggatatctcgctattctctgatatgagtaaccatttctttaccatactatgacccccagtatataagttaactcaaacagtgttttcctaatttctattgtaatccttccattatacatacacagacatccaaaaaaatttattcattactcatataaatatgatatattcgtagaggaattgcttatttttttacaaatttcatctaatacttaaaaataaaaggctacatcatttcagaatggtgtagccttttattttgttaactagatcagttacctttagggtgaatttttagccttcaggcttatatatttttctaacgaaaaaatatatataaaggcttcgtaattcgattagtgaagggttatttaatataaatatgtatagatagtctatcgtgaggtttgcctaacatacatagactaaaaaggtacacctttttatactataggaaagctaatgacaaaatgtctatttactctactaaatacaccttaatatacgcacaaaaagtaattaatctttttatacgttaggaggttacgcaaggtcaaattagcttcttattttctcttataaatcacaattagaacaatcttgattgtgcagaaatagacgcaaaagcttatcaagaacaaatcgtaaaaagtcataaaaaaatagatagtgatacatattagtcatgtataatatgtatcaccattttacttcttgttcaacaaacgcgccttttaataaaacaactgttttttaatgattttaggtaaaccatctttatcgtttgataaaggataaatttgccattaccatcaactcaaacttatttacagggagaggttaagatgaaaatttatgttgatgccgatgcttgtccggtaaaagatatcattatctctgaaggtacgaatgctgaaattcctgttatccttgttactagcttttctcatttttctaatgtggaacaaccatcaggagtggaaaccatttatgttgattctggagcagatgctgcggattatcgtattatgaggttagcagaaaaaggagatataatcgttacgcaagattatggtcttgcttcgctaggtttagcaaaagggtgtgcggtacttcaccataatgggtctagctatacaaatgaaaacattgaccaattattacaaacacgttatttgagtgcaatggctcgaaaaagtggaaagcgtacaaaggggccaaaaccatttacatcagaagataaagagaaatttaaggggctttttaaaagagcgatttcacgttaaaaaagaatcatccattgttaagaaaaacctagaaaaataaattgtccaaatattaaactaacctgctccgttagcttaagtacatttcttaacaatattctctatttatggaggtaagaaagcaaaagaacccttggggcggtaggcttccaccaaggattctttacccgaatcatgcaaatttttatgcatcgttgatatgactgcgttctttggatagttgaaagaaacaagaacatataaaaagtgcaccttatatatatatgcttatacggaaaaatatagtatctccatcaaaaaagtgctattgtttatttgcagttatttctttcatattcacctacgtgtgaaccctattaaaagcaacctcgcttgccaataccgaggttgctttttattttgttaacgataataatgactttcacctcgtataatagatttaaatattttgtccgtaaaagtatatttttcatttaaatagacgttttttgaatcattttttcattgtctaaaaaggtgtaccttcttatcattagatttttatgtttagcaataggggtagttcaatagtgtgtggtctttactatgaatgcgatttgttaccataatgcataagtgcaaaatattaggataatctattgtatagcatttatatcctatcggaggtaacaaatttgagcagaaacaacaatagattaacttcctcagaaattacaagcctgtgggtacaatacattcgggaaacaatggcaatttgtattagcaaatacgtattagcaaccgttaaagactccggaattcgatcccttttcgaattttgtttaggattatctgaaaagcatcttaaagtgttaacgaagattttaaataacgagaatttccctctaccaaatggcttcacggataaagatgtaaacctgcaagcttcttctttatttacagattccttttggctacagtacatacatgatatgacaattcatggattatcaggatatggtatgtcttttagtggctcagttcgaaaagatatacgggatcattactatcaatgtaatattgatgcgatggacgtttataataaatcaattgatattctcttatctaaaggaatttatgaaagagatccttattattctacgccacaaaacagtgaattcattacggacttaggatatgcaatggacatattggggaagaaaaggcctttaaatacgatggaggcttcaaatatatactttaatttgagaaagagtattgcagcaaaggggattattcttggttttcagcaagtaactaaggacaaaaaagcacataaatttatgggtgatgctttaaatttgtacaacaaacatattggtattttttcttcgatattacatgaagccaaccttcattctccagggttattagacacccaagttacaaattcgaaagtagctcctttctcagataaattaatgttatttcatgccgggtttatgtttaatttagcaatgatatattactccaatgctatggctacaagtatgaggatagatgtaataacacattgtgaagcatctattctaagggatttaaaacttactataagttggggaaacattatgattgaaagaggatggatagagaaacctcctcaagcaaatgatcgaaaggaattgcctcataattaaagtttagaataagacaacaggacgttaatcgagcatcttactttaccaatgcacaggttgagatttatttaaataatttttctggaaaaactatagtttagggattagaagaatagatattcttttaatggtaaatctaagaaaaaatcggtttaggagatttcatatggaaaaattaaattctgcggaaataggtaaactttgggctatatatatgggtaatagcatggctacatgtattctaagttattttctccaacatgttgaagaccaagatgtaaagaagttattagaaaatgcattaaacttgagtaaagaatttcaaagtactataaaagatactttcataaaagagaacattcccattccaaatggtttcacaaaagatgatgttaatcttgctgctccaagattatttgaagatgagttctatgtacattatttaagatacgtaactaaagtagggcttagtctttacagtgtaggaataccgttaatgtatagagcggatataaggaaattttctctttattgtatggagtcaactatagaattgggtgaacatatcaaagatgtttcaataattaaagggtgggttattaaatcgcctattattccggcaccacaaaaagtaaatatagcacataaaaattatttaaaaggtttcattggagatgtacgacctttacatgcgttagaaattgctcatttatacgataatctagagacaaacgtggcaagcaaagccttggtaatggcgtttagtcaagttacaaaaacgaaaaagattcgaaatttatttataaaaggagaagaacttacttataaagcgattgaaggttatataaaaaaacttcatgatgataacttgccttctccagaactaattgatcatttagtgacaacttcaacattttctcctttttccgataaattaatggtttttcataagatggatatgttttcaatgagagtaagaaattttggaaattcagtagcagtaaacggaagacgcgatttagcgctaatgtatgcagattttttaaaggatataacaggatttgttcatgacgcagccgatatcatgatagaaaatgggtggatggaaacaccgcccgaagctgctgatagagaagacttatcttcagagtaagggctacacagttgtcaatggtaggcgtgacgggaggcattaaggaatcgacaatgtctttatacgaagaccctcatagcactccaacaatcgtgtttgagtgccaaccggcgagagagccccttcactttcgtttaccatacctattttctcctagcagtattctagaccatgcagcatttctcctccgtttccgcatttcctcatgcaaacgacaggctcgttaccaagcatgccgttttggacggagattgcttttgcgtctagatgagtagcgtttgctatactgtaagaaagcgacttcttgtcgcaccattatcggtactatagtaaagcaaccctagagttataaatccagggttatcttagtaatggttattcaggtagaataaactttatttactttttcaacaacacttctaattgcacaaactcatctctatttctacgtgtagagaaaacctctctattcctcctatatctggtggagttctaggtattcttttaatgtttgctgtaacgttccttttgtttctgccttttcttcaaaggagattcctgagtgaatcatggtcctaactaggtcagcacgtaaacctgtaagaatagctttacatcccatcattgaaattccagttaacactttctgaaaatgatcaataacatgcatctccatgttagcagctccagaaaggtctataattaatgtttgaatctttaaatctgatatggctgtcagtactttctcctcaatcgtttggatacggtatgtgtctatcattccgattaacggtaatacagctatggattgactaagtggtataacaggaaccgataaatgttcaactaattctctctgagaagcgattaattcatctttatattttgaataactaattagaaaagtgttaagaaactggtcaatccgatcattaatctgtttctctaaggcataaaattcttcacggctattaaataggttatttattcgatcatattgatagagaaaatgccataatgttcgcctaatagactgtacccattctagtttgaaggcaagagttaaggagtgctcagcccaggctaccccttcttgttgagcgaaagcaacaagttgttcttccttttgctccacgacatatagagataacttttgagcattttttaaaagatcaatatttccagtttctaaaatgtcattaatcttagaggctacgttaaccgcctctgataagagtttatcttggaaattttgtctgttatctttaataaaatcggtcattttctctcttgaattataaataatctccattttgaatacgccccttatttactgactattgttacccttaattaataaatatccccaaatgaattattatttatttttatgccttgtactccccatactaaatatgtttttaaataagatcctttacatctttacccttaaacatacatttcgcatacatcttttataccatatctatctgtagtttcaactatgttgcatttgtcatatatcacctaatctcaatacaacattacattttttgttttttttacaaatttatttcatttttaaaatctttatttcaattattgaaggtaataacttataaatataccctatgttaaaatggattaaaccttaatttgtaaaannnnnnnnnnnnnnnnnnnnnnnnnnnnnnnnnnnnnnnnnnnnnnnnnnnnnnnnnnnnnnnnnnnnnnnnnnnnnnnnnnnnnnnnnnnnnnnnnnnnatggatgcattttttcaatacccttttttaaactgaaaaaaaactcaaacagttgtgtgagctttaaaggtaagttagttgaataaaattattaatttactatctaatagtaaccgagtttttattctacaaggaggcctagaataatgaatctaatcaataagaaagttacacacaagctttttgggataggcagtatagttaaatgtaatgattccagtattgaaatacatttcgcatcggaaaataaaaaatttgttttccccgatgtatttggaaagcatctaaaactgcatgataaaagtgttgctcattcactcgaaaaaattatagaaaaaaaggaaatggaacacaacgaggaagaacggaagaaggaagaggaaaaaaaactacaacgaaaaaaccaagaacttcgctggggacttgaaaaacttatgaaaaatcataaacttcattctgaatcacaaatggttttttggtgtgacacagaagaacagaatagttcttttttagagtggaaggttttttcaggtgtaataaaaagcggtaataacaaggggaagcccaccaaacccattcgtttgcaccaaaatagtgctgtcttgttaacagcaatagattccagtatgcctgaaaaagacagacgtatcttaggcgtctatatggtgaatgaagattttatcggtaagctttgtgaagatggatatattcctgctcattcaaaatacagactccagcttacagaacaggaatcggatcagatgcctttctggaaatattatgtaaatgaaagaacatcccaaaaaatgacatggaatacaggtaaataccgttattttgataatttatggatggctcaaattttacttgatatagctgagttgaaaagtgacccaaaggaaagagagctggcacaacaattttttgaacatttttgtaaaatgaatctgataacagctgaggagttaccaaagcctaatggcgcattgatgcgtatgtaaacgttagcccaaaggtaataggaatgactaaggactgacccatttttctcacccatcattaatagcgaacgttccttggctctgttcgctattaaaaaggcaagaacagaacataggagaggtagaaaagtgacagtaggtgattaaaatctatataaaataatcctttactattttataactatatactttttgagctcatataccagaatgaggaaaatctgtacagattgatgtaagcttttctcagctctattataagaataatacgataaccttattatttttaataggagagaagatgaaggatataacgtgaaaatatttagtaatggaaaaacagtaactataagagtatcgaatgaattagtaacaatcttaaaaagtcattatgtaaaaaacatgaaaagatactcttatacggttactaaatatccaagtatttttttctttgaagaagaattgatgaaacaagaataataagtagataatgaggagatacacctatgcttaaatttaaagttattttcgaatttataaatggcaggacaaaggaattaaaattcgaagccgcatcaaagaaagaagtcattagtcatataacaaaatatgaaagattcatttcgaatgaaaaagagttagtgcacatcaatttaaataacgtggtacagtttatgattacagaagaaaaataataataaaaactaggcatctattaattgaggtgctttttattttaataaatagactgatttaagaaataagcagcactataagatttagagcctcttgattccatgaggtgtcatcagtggcaagcacttacgaagctattgtgattgtataaaatatgagttcatataatgtgatttttcaacacacatgcaaaaatagattaagattcgatagggaagattaactgccaaaatgcataaaaagcttgcgttttacgaatgtatttatgaggtagagaatagtttttttaggaaaaatatactacactttataattccatattaagtttctcttgtaagctacctttcctgacaattcgaggtggcttttaagtttattttttaaaataaagggctttattaatcctacatataaaatcgaacaattacttaatgtttaagtaaaaaaagttacttataaactataaaaactaaaaaatttggagaaaaatacatgagcactaacactctaccttcatttttagaaaaatactttgaaggattaactttaagtccagctctgttttattcgtggaaatatagcattcgctttgaaatatcagatccattaatttcatctcacgaaaaagattgtttgaatcaagcttttcatcgatcaatcacattatttcacagagtatttgaagagggagatgagattctttttattacggatgtgcatactacgaacaaagatcgtttccttcaaaaaagacctttaaacgtttatttaaaatacataaaagataaacagcggctatatcaattaaaccatcactgtttgccgagtgtatttcaggatgaagacgaagacgatgatcaatctttgactcatcgctatgtactttcttgtaagaaaacagaattaagatatgcgcaacttttaaaggctattaattatgaagattttgctcatccatctactattctgaagagtaattcccaaagtagttatgataatattattattcgtggaacacttcttgtataagatcaagttttaataatattgctatctctttacagtaaaatctattagttaaaggaagattgtatctatggcctacttgatacgcaaattacacctataccgttggggttttaccagtgttttaattatctttgctggaatgtatctttactatttttttagtagtcaaccacatcttactggtcaatcaccaagtaaagtatggaaagctgaatacacacgttatgatacatattgggaaggaaccctaaagcactcatctgaaggtaatgttacattacataagtttattattatagagaatggtcaaaaagtgaactattctcctgataaggatacaatttctcaaaaatcctttgattttatgtctttaggtgaccgtccacaaaaaaatgagacttatatagttcaaatagaatggaatgattctaaaggaagtcacaaggaaacatttccattagagcgatcatataatcctttttagaaatatggacttaccgaagagggtagtcgaagataacatgattcaatttaagttaacatgtggatgataatcagttatataaagaagatagtttttagggagattatatgaaaaagagtttacagttatttggtacagttttatttatttcaggaattatattgtttggtcttatgcatttagctatcgccttatatatcccacatctaggagagtggagtgacccacctggtaagctaatagtggtactggatgaaattataggatggtttccctatgtgttgagtattttatttatgttacttggagggtctatgttaatttttgacttatggaagagcaaacaaaaagaacaggtgggtaaaaaaagttgaaatgaatataaaatcaaaggagagctattttgagagattttataaaattagttgttgcggcctttttatctactatttttctcagtactgcctacgggataattaacttaacacctaaaagtgagcaagaacctaatatttattactttggttttacagatacatttgtgtttacattcatttatacttttcccgtttatatagttgttggaattattttctcttatctaatcgatatgatggcaaataaaatgcagacaacaaaagtgtacgtttctaaactagcaatgtactcgttagtaggggtgattcctgcgttagcattttactttctgttcacaggaatcaagttagattaccgattattattttatttttttgccttaggtatttttgcatcaaatatcttttatcatgtcctgctacttataaataggattcttaacaagcaaaaaacttaattaaagagccagctgtctgctcacaacagctggctcttttatgtaaattagttactttaggtttgaattttaataatagggatattccttcttgttcatgataacggaatcccaaaaccagtatatgatggctgcacctactgcaaatataaacattttacgataattccatattggatcagaccaatttccttgaagcttataagagatataaaggaataggattgctacgacacagtaggtaaataagtagaaaacattgaacttcttaggccatttatttagaaatatctgcagtggtacggctgcaacagaataaggaatgattgtaataagtaagatcataaaaaatgcaatgacagctctataactaggctcaatgataataagaaatatggaataagagatgctagagctaataactgtcaacgcatgatatggtaaaagctctttaaatgtcactggctttacacacccttctggtctattctacggatgtatagtatataaagattaaagctaattaactttcgtttttttattgagcttttttgataaataaaaacaaactaatccagcacctgctaccttacaaaaaggaataaatacataagacggtgcgattaaaacaataacgaacaaataggcacttatagcaaatataagccaacttgttataagtagaaagctagataaaaaatccttcacagacttcatcccttacaaaagatttaaaactatattgttttatcataacagatatactatcctgaaagcccatttttttacataggtggttttatattaactaacagatagataaatagtataattaaccatatatttagttcttggaggatcaaattgaagaaacgttttagtcaatactctttgtggttatcgttgcttggaattgttattggagtgggacaatatttcacgtcaatatatagcttaaatattctttatatgggagtcgttgtttatcttgccggctttacatgtggagtaatagcttttggaaaacatgaaagaggtctaatgaaatactttagtttgacctcttttgtcgtaatcccactacttattatgttaggtatgctatttttcgcaatgaattttggtgaaagttaaaagaagcgagcacagaatgcttgcttctttggtctacttaatcagcacatttgtcccaattaaaaggcttttgctcaagcttatctgcttttttttcatcgactgtcataacaacccaaatgttccccattttatttaatactttcaatacgttatttccgtcaactctcttataaaggaaatatcctcttgttccttctaagctattctccaaaaacaatctcattgatccaatgctacctccgacaaacaagtgttgcaatgagatctgatcagagtggtcattcatgctatctcctacttttaaatctaattctctgtttgtgaattcctgaaacccagataaatctaagctataacttttaacaatatcttttagcaccctatcatcaagttttttacgatacttttcaaattcctcgctacaagctttctcaggtcgatttctttcttctattgaattggcaaatgcagttccgtaatttattccataagcgaagataccaattatcagcagtaaaagagctgcccttttattcatatatctcaccctatattcatattttgttgtatttttgcccagttaggttgtgactattcttcaggtttcctgaagtaaatgctgctttgattccatcataataataatgtattcaataggggatagtaactaagaaatgtgagggaataacatgaaaaaacttaccttagttatagtcttgtcgtttatagtacttgtttatccatatcaagctaatgccagtaaaatgccttgtagtttgatattagaacctatagataaacatttaaaaaacgcaaaagacacagccttaatatacaaagtacaattgaatccacctagttttcctcgaacaaacattagtattttaggcgttcaccttcctaaaccttcttcatacggacgctatgatggatatgaaggggttgcttctgtacctaatgaagtaagttggaggttccgtatgtatcccacgcctgaagatgaaagtcctacatgggcgggacgtttcgatttaattacagtagatatgaaaaatgtgaaaatacagattcgtctttcgaattcaaaaacagaaaagcttggtcctcctatactgcaagcaagaatggctctatgtaagtgactcttttacgaacctaaaaaacaacgcaggtgtaaattttaaaaaaggaatgtacaaaaaatgaaacagtttatatgcttaattcttgctattggtttcctattttcagaaactccaatggcttcggcctattcggatactagacctgctttgtacaacttcgttcattctttgacgagaatgggaagtgaacaagcagaaaaatacgtagctccaaacgtagatattccagaaatacgtgaagatacacctttacttaccatacaagggttgccttcatccaaagaaaatgaactaatccttattggatattttaacgataaaaaagtagcaaatgagagaatcgcattcatttggaaagtctcatttactaaaactcaaattacaaacataaacgaagtatacaatggatctaacccttttatgaatgaaatcaaaaccattgaaaaatacgagaaaagacatcatgttgatatactgaaacccacaatttttccttttgaagtcacacatgttgacacacatcaggataaggatgcgttaattattcgttaccgaaatgataacttacacggcctgtttcagttaaaggtaacaaagacgagtcattccttagaggaatatgcaagcaataatgttgtatcgtatacgctaagggatggtacgaaagctttgtatcagccaaactatattccagcaaaacaactactgtttcaacgagggaaaatacgatacaccattggaattagtcaatctacaaagaaaaatgttgcggtgagtaatttgctccaaattgcaaattctatgatttcaaattaaaagaatttaagaggtaaatgtgaacatgagaaaaatcatcgtagctatttttactctgttgctagtatcaaacgcttcatcagcttatgcaacgagggacttacccactaagacaaaagcaactcgcgaaaacattttggaagatgccgtgattgatttattagatagtcaaatgacacaagcagcagaaaaatactacggtgcaaaaaatagtaagggagtacggtttgattgtcagcaggtattatccattaaaaaattggaccatccaggttccatgatgtttgaagcaatacttgaaggggtgtcatactttggccctcataattcaccttctcatattttcaaagtgacgattagaaaagattatcacactaacggttgggagatgaagtcatttaaagtaagaaatttgaaacctcatgaagtgtatgagtgcagagacccagcttagaattcttcatttaaactttctgcttgaatgaacggacggatacagaaaaatggacaaatcaaatgaataacaatatgatataattttcggtatccaaaaaatagaaaaaacatattcagttaaggggaaattatatgaaacacttattagataggtttaagaacacagatttactggagatttatacatacgaaggtgacgtcaacaaatgcttagtagcatatattcttcaaaccaatgaagagtatacactgttagcaacagttgggacttctggtttatatgacggacactacgttatttctacagaaagcgttgtttcagtagctactgaaactgaatacctgaaaaaaatcaaaaatctctacgaccttaagaaacaagttcatccaacatatacaggaaacactgaggacctaattagaggcggcttagaatttgctaaagcacagaattatattgtctcacttatgctattagatagtgaagagtactcaactactggatttgtaaaagaaattattgagaatgaaactgtagttatatctgaagtggactcatttggttttgttgatgggaaaaggttcatagacattgaagctatcgaacatttgactatcaatggtgaagaagaacaagatataaagcttctttttagtaataacgcctaagtaaacggagttataaggaggtatcttatggaactactaaatggtgtaacaggtttttatatagacctaaaggataaacctcctgctaccagtcttaagcagtttaaaatacatagttatgaagctgcaagaacttataatggagaactattggaatgtaacgatacagacgttcattccaattttctttttagcgttttaagaattagtaataaagaggtctacgtattgctaaataagcattatccatttgttgcatttgcctcttctgttcatgaagagagaatcacctttgttaatgacaaagaactaagcttcttcttttcagctttttacacgattctaggtgcagagtcactgaatgaaaagttaatgtacacccgtaaaaagggatctgtactaataaataatgacaaccaactaaatagtgcagaattagcgcaaatagcatattggaaaccaattactttaggggaagttctttataactactgggattaagtttctactaagaagaaaacaaaatggagatataaaaatggattcaagaaaagctatgttgatgatattatactcaatgtctttggtgcttatataggctatttaagttataaactattgagaatgttaagtttgaaagctgtacaattagtttcttttaaaattacccataaataatatcaaaaaaaaaagcagttgaaaccgatatgttcaactgcttttttgttcctgtaattttgattatgtaaactgattttgtatatgggttacagttattaatctcgataaaggtataattaaggagtaacacttttcttatgaggaggaatggcttaatgattgataatagattatctaagattaagaatcatgaagtggatgattctttgagtgaacttactgacacagacattttgttgaatttccaacaagcaattacgagcttataccctcatctaattcctatacatgctcatgcttatgatgcttgggacgatattatcattccattgttttatgaaatggtttataagacgtttacttataaatacggtattgagattgagccaaatgaaacacactcttatatgtttagcttaagacgttatgaaggtatccatcatattgaatgctttccaaaaatgacaccttttaaaggcatactgaataacgattattttgaggtcaacgatgaagaactaaaaggaaaaaggcttgttttcaagtcttttggagatagtgttcactatttaacaactggtttggatactgagaatactgatgctgttaactttgaattagttgaggtagacgttatatgttctcaatcaaacaggatcacagatattgagggatgtactacattttttatacataaagacgatgtagaatttatgtttattgctgagacttttaatcaacatttacatagggagtaggaatatgatgaatccaaaagaaaagcaaagttcaaaatttagctctatgtttaagtcctacgaacaatttttgaaaaagattttaaatatgttcttcactagatgataattcatacaaaaaaagcttttaagaaacataacacttaaaagctttttttgatacctagaattcacattatgttaattaaggttgttagatttaccttttaaatctaaatataagttggcaaatctttgatagtattcaattgatatatattttcttgcttataattagagcctattcctattccaaaacctttaattcccatgtttatcgctagttctatatcaactattgagtcaccaatcataaaacattcttccaatctaatttcaggatatttataaattgctttcataatcattccagtttcaggttttatacaagtacaaccttcgtctttaccatgtgggcaataaaaaacatcaagcaattcaaccccttggacttttaactcatttatcatttgattatttatgtcgtgatactggtcaattgtaatgtatccttcgttaataatgtattggtttgtaatgagtataattttataacctttttttatgacttcttttaacgtgttaattgaaccctctataaatataggacgctctattctagtccattcatgatctagataatcttcaattatagttccgtctctgtcaaagaatgcaattttcaatgttcacacctctcattattctattttacaaaaaaatacatttatactttgtaattttactttcgaagtttcgctatgtcgagaaaagatacaataacttttagtaatctaattaattctaaatatgattaccgataataggttttatgttaactaaaattgatcctagaaagacaactttattaaaaatgaggatagtttggttgttcttagatgctagaagctaaaatgtccaatctataatattaactatatagatttttcttcattaacaaaaatagttaccatgcattagtaaaaccacctatagctatggcaatcactattagacctatggccatgtaaagaaaggacccccttcctttccactctaaatgggtagtgtaactattaaaaacgagcgatgaccctaacaaaacaaggccaaatgactttaaataaagtgaatgttgaaagtaagaaacgatagctagaatggctcccactacagccaaaagcacataaaatactttcaatactttaagatatgtcatgcatttcccccttttgcatcaaccgtatcctatcctctgttacccagcatatgtttgtccaatatgaatttaggtctaatttctaaaaataatcaaataaacatttgaatattttagaaattagcgccacctctagttgtaagtgtggctattaatatttaatttcactatctataaggtacattacgcaaaattacttgtaataaattgtccttaataaaaaagcgtaatttatgattaaaagagaatccctaatcacctattcttctaatgccaaaataagttcaactagataaaaataattgttgatatatgtaagtttttgaaggtgaataagttgaactaaagggttgaaattctgcccttcttcttgtataataagttcaacagaagtttaacttaaaaatgaggtgtatagagatgaaaatttcacgttttaataaagactgtggaaactccgtggatatgaacattatggatgggtacctatttgacttcccaaccaacgttgtagaacttcaaaaagaagctgctgattcattctttacagatgctgtgacggcaccagaagaatttaagaagcgtatcttactatctacaacaatcggtgacgaagagaaagaacgttatttcttagtcggtgacatcgccgcaagccaacaacttgcgaacaatcacattaatcgtttacataataaaattacaagccatattccttacgtgacatttttggctgccattgcatactatcatgcattgcatgcgaaagatcaaaaggataatagcattgagattggttatttctctacgatgttaccaatctggttactaaaaaaagaaagcacatttggtgaagcacaaaaagcaatggcaactcgtttcttaggggaccatgctttccatattcatacaccagggtttgaaaaagaaataaaagtttctgtggaagaaagtgcatgcttaaaagaaggagaaattgcacgctttgcgttaaagaaagacctaacgcttcaagaccgtgaagatgctaatgaatatgtggaatgcgaaaccgtaatggttgatatcggtggaggatcaattgatgtcgttattttaccagagggattaaaagctgcgaacagccgtgaatcattccaaagcatcgagggtattccctatttagctcatatcgataagttacgaaaagagaaattcccagagctgtttaccgatttacgtgcttttgatcagtttattttagataattacagcaaacaaaaattcgagttgaaaaatgaaaacacaggtgaatccatcgacttaacagctcaaattagatcttctttaaaagactatgtagagattttactagcgaagttaaacgatgtagccccaccgccagcaaataaaattcgtaaatatgtatatagtggtggtgttgctccgacactagaagtagccattatgaatatcatgaatgaaaaaatcggtgaagaacgtacagagaaatatcataaggtgccagaagatagtcgtcacttaaatttatttggcctagaaattcgaagccttggatatcttcaaaagaaacaagccgagaagaaagccgttaaatcctaacaacgtaggtgataaccatgtcagagcgtcagaacgcctttacgataaaaaccaaccagttaagtgatgaagtctatgacgtacttgcaaaatatgcaaagtctcgaaaattgggggactatatttcatctttaattgttcgtgaactccatcatacatctaccgatcaagtagaacaggagaatagaacagaagaactgctcgaacatatcaattctgagctgcgggagttaaagaaattagctcaagctaatggttttgccaatgcatcagacgatattaaagagaagtcttcagaaaaccacgctatcaaagaaggaaaaattgcagatttagaacaagtgtctggatctttagatgatgatgatcttgaagaatttagtgatttttaaaagcctaagccactagtacatctagtggctttagttgttaaagtaaaacatatctttttgaagctttattatgaattccttttaccttcattacgtaatttagtaaatgttattccataagtatagtagaaaaatataagccttctctctttttattaggtggaaggctttattttatatattcttttttaggttgaactagcatttttctttttctttacaggcaatccgtacttattagagttttcctttatttttttagcgatttcttgcgcctcttctttcgtcattttcatacaaaagactcctctcatgttctactattataagttttttccaatatctaaaaaaattatacatgctcttccctcccctgccatatatatgttttaggtatgtacagaaagtcattgtcctagagataaatttagattttaggagtgattgtgtgagagtagaagagaagaagaggagaattcgaagtgacaaaaaacgagatgtaaagccatcacttccaattgatcttaaagaatgtatttatcgattatcctatattacaaatacccctgtaaaaaatgtagttgaatcaatttgtatctcaggtcttgcttcttcaaaagttatggactacttatcaaattatttcagaagaggatttagctgtggaagtacagtgtatatgggggatatgtccaaagagccaattagacagttatataaaaacatagaaaaagaacgtgtttctactcgcttaaaagatggacacggagaaacatatgatgttctaaaacgtttagcctatgctttagattgttctcctgcattagcagcatctttcttaattgaagcgagcattaggaattctgattttgtagatgagtacatgactcgacatttagaagaagagttggatcagggacggctaaaggaattaaaagaggtattaaaattcatcaataaaaacaatccgtataaggaagagtacagtttacacaatttaatttcttatattatggatgaattaaaagttggggccactaacctaggttcttctgtacaaaattggttagaaagtatgcaacataaaaaataattccacctaaaaaagccttagaatctaagattcaaaggcttttttcttatcttttatttctttatataatatttctgcacctgatggacttagaactaggttatttgcatatttacgattttcggttgttatctcacctgtaattacacatttgttgcattctttgtatttctttatttctatatgatcctcttccaataaaatctcaactgaatcgtctttacctatatccagtacctttctgagttcaatgggaattactatacgtcctactgcatctatctttcgcaatgtacttagtcctctcatgctgactctccttttatatactcataagcataactttcatattatactataaatgtataaattaacctatagggagtttataaatcagctctcaagatataagttcaaaatttcttcttaatttgctcttgtacgtaagtacacgtacgtgcatgttcacgtgaaaagaaatgatcttgtttatgataaactttcactccacaagaggggcaagcaaagaaacccactttaggaccttgagtcacttcgtgcgcataaaactcaccagctgtttcaaacatcactacatggttcgctttctcaatcttagctctcatacaagcatctcccaccttattttaagtttaattccataataaggtttaatatgttgaattgtaaaagaaaatgtataagtatatacctatatctgcagaaaaaaagcaacattgtcatgccatttgcatatgagattgttgctttcaatgctatttctatacacacttttaagttttatcccttaagctattcatcatctgcacgtttatcttttaagataaacatgcggatcttttcaatgtgttcaggataacattgacgaactaattcattcttttgcctaaacggattagtggtaacaaaaaaagccgaaaaggtaaatttcagctttttgaatcatttaatatctatatccctgcgtctataattagtaagcaaatttaatcttcccagacttcattcattaaatcttcaatttcttttgctagtttttttgtttcgcgtctatcaatctcaactttgtctcctgtaatataaacgacatccccaatttgtatttcacgagggaagatacccttagggtaatcctttgtttttccttcaatttcaacaacagcaaatccctcttcaaaccgatcaataataccttttatctttttcataattacctcgattttttaacagagtaagatgttccatcaccagtgataataatcgtaccactttggtctgtgcgcagaatacttgctttcgaattttttaacaagttcactacttgagaagtaggatgtccatagctatttttaccaacgctgatgacagcatacttaggttttacaacatctaagaaattcttacttgtagaggttttagcgccatgatgacctactttaagtatatctgcacgtagtgttttcttggccttgatcatgtctgcttctgcttttgtttcagcatcacctgtaaataaaaatgtatttttcttataagtcatgtgtacaacagcactccagtcatttaaatcactattagtatatgttttggtaggccctacaatttgagcgtttacatctttaacaggtagctttacgcctgcttgtgctgtttggatctttagctttttctttttaactgcatttaaaaagtctttgtaagcttgagtgttattacttacctttggtgcataaacattttctactttgaacgcgttaataacttcatctaatcccccaatgtgatcagcatctggatgagtagaaattaagacctctatatcatcgaccttttgcttctttaaatagcttacgactagatttccttttcctttgtttcctccgtcaatgacaatgtcttcgccattaggagctttaatataaatactatctccctgaccgacatcaatataatgtactttcatggtcttaggtgttgctgcgtatgatgatgcaggagctgcggaaatccctattcctatagctagcgaagtaacaatcttcataacacgacttttcattgttttatccccttttataaatggattttcatacgtattgttcatttatagcaaaattaattctactacatgaaatcatccgttaatatgaaaaaattgaatatttttacttataaagatgagaaaagtcatgttatatgtgaagttaagtaacaaaatggaggtaaatagtaacgaaatgtgctattttaagaattaagcgcaattgacattttaggaagggatgatcttatgtttaaattaccatatatagttaaccgtaactctaattaatttgaaaatgaggtgttttcagctattatgttatagccaaacacacaaaaacgttggatgcaaaatataagcaaaaaaggctttattataaaaaatgtttttatgctacatatcatggaaaacttgacttgactctgtagtaactgtaatttgactacttttaaaatcttataaagggtggcatgtgaatgaagaaagagctcttatttgaatcgtatgccttgttattcgagattgaattggcattagtaggtataattgaaaaagaaatgaccagacattttgggcatttatggagacaaatttttttcgtcgagggtggaactctcctctgtgataaccttccactattctttaggctaagtccccttcaagatatcttcacagatcatgagttacatgaattatgtatattaacagatataaaaaacattctaaatcaacaatcaactatttctcaaaatgattttcaccacgttgaacgtctttctcagcaactaaccacaaagaaaaacctcctattgtttatctaattttatttagaattaaatttaaagagccttagattataataaaattaaacgaaattgataataaaaatgagaaaagacataatataaataatttgtaacccctttcaataaatggtagactgaaaatttattgagtgcacaatttatttgatagaataaaatcattagaaggtgacctaattttaggtcaccgttttttattgatgacgaagcttttcaatttcttcttgagtaaatcctgttaactcagcaattacagcgtcatcaagtcctttttcaatcatacctaaggccactttttttagcgtttcttcttttccctttttttctccaagcgtttctgctctttttaaagctgacttttcatctaacaacgcttttctacgggcctcataagctaataatacttctggatcttgactcacacgttcccattcatctatggctttctttaacacttgatcttcttgcatcgcaatctcctccaatacttgagtgatttcttcatcttcagatgcttcaagtaataataaccatcgcacaagttgatcttctcgtgggtccacttctctattacgccatttgattaataacttaggtagctccatgaagtgaatttccagcatatctgttaagagcaatttttgttcacgctcatacagctgaaaagttgagtgataatcatggatatgggacaaataacggaagttaacgatattaattgtaattgttttacaaagctctccgtagtccataccttctttcatttggctgctatacattttggaccagtaatagagtgttcgcttttccatgtcatgtttattattaagctgaatttcaatattgacgcggcttccatcttctaattgcgcgtgtacatctaaaattgagcgtttatcttcttggttttctttattaaaatgtggatccaataactgaaccgtttgaatttttttctcgtttggaaagcgaagtgctgcatttaaaaaagcagctagaatggattcattgccatgggtgccaaataacgatttaaacgcaaagtcgacacgtaagtctaatcgttttgtcataatgccctccattatctttatgtttattattagtatatcacgtctagatttcctcttcctataccacaccgtataactaaacacagttacattaaaaatcattttgagggatgggcaaaaactgatataaaacgttatttaattcatcatcaattagtaaagatagcttgaataaaattcaggtgaaatagtgaaatgattggttcacgatctattagttgtttcgtctttttagatttaatcgtcataattccaataataatcgttaaaatactccaagcaagcagagcaataagaccatttcctatactaagagtttgatctgtaaccaaagctccactcagagtaccaattgtaatagctgagaaaaagttaaaaaaattcatctggctaatctcttttctacccattatccttgttaagattaaaagtactaagaatgacagaactactctgactataacctctaagcatattcataagtgatcctcttttcttaattattaatgtacaataactagcaaaaatcaaatttctaatacttgctaaagtcctcatccaaacaagatacgagtatgccctttttttcacttttcacaatgaagttttaacatgagaaaaaggatgaccactcaaggtgtcatcctttttcttgtacatggcaatcgttttagtcttcaacacaaggaaatgaaacgtctgatttcactttttacagtgtcattagtttctaacatttagtatgtgaaatgaataccaaattatacgtccattatttaccatgtatacacttctcttatcataggaaacttaaaagaaacaaggaggtgacacaacatggcaaacaacaaaagcagtaacaacaacgaattattagtatacggtgctgaacaagcaatcgatcaaatgaaatatgaaatcgctagcgaatttggtgtaaaccttggtgctgacacaactgcacgtgcaaacggatcagtaggtggcgaaatcacaaaacgtcttgtacaaatggctgagcaacaacttggcggcggacgtttctaataaaactttataatgatggctggaggaagaatggatatccattcttcctttttccgtttgtaagaatcttctccttctaatactttacgacatctatagccagggtggagttgtttatatacataactcttaataaaggatatgttttaccttaacgtaagaaacttatgtagtgatgcttacaccttaattaagagcaatgaagaaacggaaagtttaattcttatttattttatccatttaataaatgtcattctgcctttaaactaagggaaagctacgcatatagtaaaatctgaaggtagtaaatatctttgaacaaggagggaattagatgggaaaagttttgttctttaatttccctggagaaggtcatattaatcctacaattccattggtagaagaattgataaagcaaggtgaggaggttgtatattattgtgtagaagaatataaaactaaaatagagaaaacgggcgcattgtttcgaccttacgaaaattttctaacgcctagccatatcacaaaaagagtaaatgaaaaaatagaccctcttgaaatgctgttgtatatggggaaagccatggatgcaaccgtagagaaggttttaaaagaagtaagagatgagaaatacgattacgtaatttatgacaataactttgctgcagggtggattattgctgacgttttaaatctacccaaaatttcttcttgtacaacatttgcgattaatcgagaaatcttctccactcttatgcaaaatagaggagaaatggataaaacctcttcaaagtatcaagagattgaagagattaaaacaaaatggaaagataagtatggcgtgattcttactaataaaaaaaatcttatgacatgccctggcgatatcacccttgtatacacctcaaagttctatcaacctaatgctgaagaatttgatgaatcttttatttttgttgggccatctattgcaaaacgtcacgatatagagcacattccatttaaagtacagcatgatactaaacttatctttatctccatgggaaccgtatttaatcagcaacctgaattatatacaacatgttttgaagcatttaggaaaagcccccataccgttatactagcagtaggaaaacagacggatattcatcagtttgatgatattccctccaattttagagtgcatcaatatgtacctcaattagaaatattagagcaagcagatgtttttatcacgcacggtggaatgaatagttctagtgaagcactttactttggagttcctcttgtggtcattcctgttatgggggatcaaccaatagttgctaatcaaattgaaaagttaggagctggtttacaacttaatcgtttgaacctagatgctcctacattacgaaacacaacagaacaagtgctatcaaacgcttcatttaaggataagagttctttagttggaaagtctttaagagaagcaggaggatataaaaaagcagtagaagttattctaaaatttaaagaaaccactcgtatataacaagtggtttctttatgctacgttaaattctataaaacatttacgtatcattcctaagattgttagggcattttctacttatatatcaaaaaaatcatgaggctgtttacttttatctattttctttacacctaacataattttctttagtgttttagggctaggttcgtatgtagagtcattacacaaagtagaaattgttcgtttagatattttactctcgctagcaaattcattttgtgtgataccttcccgatctagaaattttccaaatttgctcctctttggatttttccaccacaactttaccactcctgtttttgttatcatactgcccatttaaaaaacatgatatacattcttttgcactttatttcattcttttgcacatattggacaagcatcagctcatatcatttattaagacgtcaaaaagagacgtcaccttaaatcatcaggactggagagagtagtatgacaaaagaattagcaatctcgttattgaatcgaaaagacgtctatttaacgttagaaggtaagcagatgttagaggtcatcctgaaagagaaaaacgcgtatgaagtaaaataagaagccgaaaaatcacatagaaacctatcgaccaaccgtgcggtatcattctatttatcgtacatatgtagatagtctatttcacgctaccgaattagaccgaagccaaattatgaggtgtgcgctttttacagcagcgcataaccctattttcttagcattaatgaatgagtataaaatgagtgacgcccctctcccctcctctccatggcagccttcttctcacccgttatggatggaacaagagcccaacatcgaagagaaaggagcaggcaaacatgataaccttgagcgaaaaggaacgtctacaagcgcttttacgttacttggaacatcaacagatggccaatccatgtcaggaacagctattcaacccaatcaacagtcttctgccagagaaaaggcagcacgtatcacgtatcacgagacgtcagcaacagattgagagacgaacaaggacggttcctaccttacgactatccaacaatggaggaattagacttgatttcaggtaaaaaagtagccttacaacgaaaacttaaaatagaaccgattgaaggttcttataatagctatgcagtgaatgaaaaagaaaagagggattggagtgggagtgtctatttagcttgtgtcgcagctattttagcaatagccttttttagctgacgtctttttagaataatgtcgatattttggtcataaatatatagcatgaatacagttaagaccgccttataaactgatgcataatgggcggtctttgttgtaaatatgattaaaaaattttggagagtggaaagagtttaggtaacgaaaaacaagcataaagattcatataaaatatatctttatatattttataataaaaatgacacaggaggtatgtaaatggaaaatagtcctcgtttcgcagaattagtctctgattttgaaaaacggttagatcgacatttaaatgccaaggaaaaagaactacttgtatggataaccaaagaagaaagtaataagtatgttcaataatttacagttatcctcttcacctttttaaaaattttcttatatatagcgtagaactacctatacagggcaggtgacacacagaaaaaatcctacacactgaggtgtaggatttttaaatagtcccgaatattagattagaaacagagggtatacggtattgcaaatgaaatgaaagtttaactttccatattatttctatcaaaagtatctttcctattgaatatggcaaccatcccaatttgctacctgtatctggaacaacaaaaggtaataagttacaatttattctattgtagattgggtattaatctataaatgcttgtttatcctctatttcacctggttttgcatatgtaacatacgtgcctgccatcatgtcatgaagacttcttttatccttacggaaaaccaccatgaacacacttacaattaatgcaatacctaatgtaataccataaacaatgccggctacaagaactcttaatagcattgctccaaccccaagtttctttccattgactttgacaattctaactccaacaattcgtttccctatagtgtatccataccataaaataggtacagcaaccgcatagatgaaacctatgagtgatgtaatgggatcttcacgatcaaagtctcctgtgataagaaaaccaataagccccaaaggaatacttacaataatgccatctaacagatttcctaataggcgtatccaaaatcctgctggttttgttacttgatccactttatatttctccccttcttgtaaattaacactttatctatctaaatagctcctcagatgatgataacatgattaaagaggaaggtaaaaaatataaaatattttaaatttacccactaatagtaaaatatatgtctctagtattgatattactaaagacttgttcatagaaaagagataaaagattaattagatttttttagttgtaaatttcctttattaaagataataacggcattgtaagcttcatataaggcatacaaagggtaacaaaaagccataaatacaatcatagttggtaccttttcaacaataggaaaatggccggacaagaaacttttaaccgtgattccttggtaaaccaataaaggaatgataataacagctaataacaataaccacggggtcatctgggtttccttcagtttttctcgacaatgcgggcatttcattgtaaaaggacttgaaaaatcttcgaaatgctcaattgtaataggtttttgacaccctggacaaggtgttgattttttcatataagtatcttctttttgaaatgtaaaagaataaaaaataatagggttattgaatatataacattgctcttttaaaaaagctttaaataagtttagagctgtctactttgataggatctacacgtttcacataggtagctgccatcaaattgtgtaaacttgaaaaccaccataaaaaatctaatgatagcaactattcctattgtaagaccacacatgagactcacgattaagacacgtaaaaccatagactcgaagcctacatttcgctaaggttatatttaaattgtttgtataccttgtttttgtgttggtgattcgttttcataatgttaatgatgacatgttgctcacttttccaatgcacattcacatcatgaatcatagaaggttgaattccttgaagctctttatattggttaagggtgcttccgggttgtccgtagtacattctaagagaatcagccttttgtttttgctcataatcaaagtaatcagtggtttgtttatacatcttttttacttcaacaatgttttgtttattaggagatgtgctggtcgtaagtgagacgttacgtatcaagtttggctgttgttggcttttatccaagaaatgattcatgacaaatacaagaaaaattactccaaaggataacatgatccaaagccactttttcatggcgacacttcctcttttatgattgaaaatcaaaatgagtagatgatctcattacgaaatagcattttctgctattttgtatccttagataataacatactcaaaaactcttgaaaggtatcagcaatctttgatgtagctggatcacactcatatgattcttcgtaatctagaaaatcaacagacggattgtttttatcatagtgaaagttcaaacataaataatctccccatgctagcttcgcaattggaattaattcagatccgatgagatcttcatcataaaaattccggccttgttctcctaaagaagtttcgcaacaaccaatattatacacaccataaggatgctcactaaagtttttaataatgcctaaaaaacgttcaatttgccacctcttattgatggctgttagtggtgtagaatctattactgtacatccgttatagtgtttcaagaattgttatcaatctccttacaatggatcagcttcaaggaaatacattatgacttttgatattcatacataactggaactttatccattttaacggttttggccacaatataacgacgataaccatctttcaagatattcgatcctttttcaatcgttaatggctcatccagacgccctgtacgtttcacaaaatcaatgaccttttgtgttttttgagggtttggacgtgtctttaagaactcttcaggtacgatgatttcgtcgaaacttagaagatcttgtgtcccttttggctgatttgttatttgtttcttttgtggctccacctttttctcttgaacaggtgtctccttcacttctgcctgtactttttcagctttcttctcttcatttgctgcaggttgagaagtagttaccggtttttctgcctgcttagtagcagcaacttcttgttgcgctgcagaagcctcttgtttggcctcttttttatcgtttggttcattgtcttctttgtctttcttatttgggagaacggtaatctggaagcagattacacctacttcaccagggcattcatcaatcggaatgtctaaagttggttctccttgaattaagatcttttcatgcataatactttttttcgtgagacctgttttgttaaaagccttctttgcaacaaataccgtgtacgaaataaacgtactcttcttcaagcctttaggtgcagatggtgaccctttttcacgcatatcaaaggcaacatagcgatcgtattctcgtagtggtcctgtggctgatccagttaacgtaattttatgtggcataatgtgctcctcctgcgtagatatagatttatttattatttagaacagtattctaaataaacatatcctaacaataatttagcttctaagggatttctttactttttacattttcttctgtcgtacatataaacaaagactatgtgcatacttatagtgtggacttgtagctcaatggtagagcagccagtcgtattacactatacaactttggtgtcttgcaggttcaaatcctgccaagtcctcacttaaaacactgaatacgttaaaaatagtaaaagtccttgctgtgctttagttatgtttaaaaattaagaagctggttcctttaatttagcatgttgattcaacaattcctgctcttcaggtgttaatgcttgtcctaaatcttgtttcagttccgccatttctagtgaactgtacgtagagcagtgttcttgcagcaagcattcctcttctgttgtaagtttttgccctaggtcttgctttagatagattacttcaagctgttgttccaatgtcacttctgtttcttgtgtacccatttcttgatcctgctcagcctttaaccaatcaggaacgatttctttacggataatattttttggtataaataattttgttgatgacgcctctttatgtataacttcctcatgagttggatatactgatgaataatcctgatttttaggattcaccaactgatagaattggtttttcgcaattttatagagtaattggcacatattatctaaggacaaggaatttcctttatgattagcttcatgtacatatttgtctaacccaataatagatgtatacgcaatttcatgtacttgccctttggtaatatcaatctctgtatctcgttttaccgtttttgcagcattttgaatccgagcataaaagtcttttagttgatgaccatacttacctgcatatacttgattgactttcttaggaacacctttgatataggtaaatgactgtgaaacagacattaaatgattatttatatgatttacaggtaaatcaaggttaataaaggcaccaggtgatttatcggcctttaagattggtgtatcaacgttttcagcactttctggacacatcacaggaagcgtcacaggagttgtcatttcttcttgttggaccatttgtatacctgttgtatcatgggcaaaaaagatttcgtcgcaaatccgattaaagttcttatggcttttaagaataaatacatagctatcagggtgagtacctgttgcatcctctttaatgtaacgtgctacaagtataaaaggtgtcgcttttaacgaacgtacaaaacgagaaaccgtacttttagaaactttaaatttcttcatgagtgtttcagaacgaatggcttggatgcctgtagccactaggttataaatgacatgatcaagcatttccattctttttttaggaaattctttatgtatagctgattggttctgtttataatgagtacggataatttctaaaaactcttctttctttttccgaagtgtggatttgttcttccataaccacttaaaccgtccgttgaaggtgtctacatcttttaaatagcaggtcaatatttttgtcatttgttcattatctcctttaaggaacaaaaaaagacactgtttccctggaaaaaggaaaacaatgtcgtgattttgatgaactaagcccttgaaatagacagctatttcatataaaataaaaccataagttttattttatagaaaaactaactctattaacaagagacttcgacaagtgttttccctactgtaactagggggaacggtttaagagtgctaccaacacgtcttaaacagttgaagtcttttttctattccggtcatttttgttagttttattatagcgttaattaatctcataattcaataagaattagtaatatatctcaaaagatttagttttgcaccttttatgaggtgcaaatcctatctatattcaaatgaatttattgttgaaggtattaagagaactttctctgacaactgctacaaaaataataaaacagcttctaattactgaccagtaattagaagctgttttattattttgtgaacattcttttccatatgctttttccttgttctttttgaatttcggtcatagctgaatggatagaatctagttttttaagtaattgatcattcacttcttttaaacgctgattgtcttgttcaagtttattcatctgttcttttatttctataacatcttttttttctgccaaattttcagatggaagcgttagttgttctttcttttccatttttttatccatttcttctatttttttagcaagtaataaaaatgcttctttaaaggagttttcgtttatatcttcttcctctaaatccttgttaataatttttgtttgttcttcgctcattaaatttgctttaattaattcttcacgaatcatttcatttggtgcatgttttccgaacttttcctttagttcaataatcttctcgatttttttatcttcatcagtaaatatgtatcttattcttccaattcttttatgtcgtactaacccgacttcgcaccagtcccgtaactgatgattttctatattaaattttctagcaacttctgaaataaccattgtttcttcgctcataattgtacctccctcacaaacgaattaatttaacttagttagtatcttcttatatgaaatatttttaataactcaattaagtctaacttaattggtcctgactaattaaattagacttattttaaagcttgtctttattattctagcagatttcacacttaactgaattaaatttattatattttacgttatgtagttcaattaaatttgtactgagttcttcaaaaaactacaaatccattatagttttttaaaatattacaataagtttaattaaaatgcaattaagtccaactaattgtattttaattaaacttttatttatttacatttaatttagtttaacttacttcattttaagttcaactaaattaggtttgtatgctacgaggttattttaagttaatcttaagttaaactatcaagtttggattggtaatttagaacaaaaaagttatgtgttaagttgtttttctcatttaatcctcaatctattgaggattttaatagctgagactactgtcgattctgtttagataatacacttcttctgtaatatggtgtgaaacatatctatgtaggcattatcataaaagcagtctttttggctgaaaagatgctttatctcttatttgtggacatgcttagtaaactcatgtcttatttattgtgaatcgaaatcgttacgaatagatatacctttttagggcttttggacagtgtaagctttttgaagtgcttcaatgattaattctgatgtgattaaacgagaaaaaatagtacacaatttctttaatgtgaatttaatgaagatgctaaacaacaccaaccgcctcgtatcatagagacatacttaatttcaggcactcattgtctagagagatttgataaatttttgaaacgctaaaatgtgttttgctttttcttcaatatgaccatagcctcttttttgaagaatcttagctaattctctaggtattagagatctttcctctgcattaaaagatgttaatacattcacgcagttataaattgttacttttgatcactatattcgctgcttaattatttaaccaagttttcagcatggtataaatacataatctgttttttaagtcatcattttattttctcccacttatgttcatttcctaattttgtccattagtcataactaatccagactcaattgagtctggattagttatcttatttgaacgagaattaattaggtagagccaccttttattggtacatttagtctgtgtatacctaattgaaattaatttaaatcaattaattactaattgggtataaaaaatatagattcgacagcttttaattagacaagttaatatgccctattttaattaaattaaacttctttttgttgagttaattttaattcaattgattctaaattagtgataattaactcgttttttaaaaaatagagttagattcttgcagaagaaaaaagaaaatctaattgtttagttatatattagggtgataataaaatcttaaaaagttatttagtgaattaatgaaaaatttttaatttgaaaagtacatgtctttaatttttatcaaaagaatagagaaacagaaacaaggatataaaagattcactttgatgctaaaagcatcctgcttcatgaatataagcagaaaattttacgtgaaaagatgaaaaaatgaatgaaaagcaacaagatttagccatgaagtgaaaaaacccagggggacgcaaaggggacatggctccaaaatagggggacataaaggggacatcgggattttaaaaggggacgtaaaagggacgtacaccaaaaaaaggggacgcaaaggggacatttagcgattttctttgtacccacggttttgctaggctctgcctagccccacacctatggtgggggcaaaaaccccttatgctcttctctctattttttgaggagcaccactattttgaggagttgacatgaaagatggaaattaaaataagaaatgtagatccgattgcagttaaaaaaattgatgagttagcaaaagaacgtaaggtatcaaggcaagaatttttaaaaagtcagcttgaaacgctggcttttttccgtaaacaaacagaccgtgaaaatgaacttgaaaacttgattgaaaagaatattaagatgatggaaaagtgtgctgtttctatggaaaatatgaatcatattttgcttgaaatgattggagatccagaagaataatacagatcctttagaaaaattcaattgggttaacggaggtaagcagatgtgctagaaaaaacaaatagttcaacagttgtaccaggcgttgtattaaaaacaaaattcattacagcttctcataaagcctttcaagagtatgttgattatgttgatcgtgaggaagcaaaaagagaacttggagcgcatgagaaattgttttctctttatcaggattatatggataatcctgataagacttcttctttatttacccaacattctgatcgattgacaggggaacagaaagaagaattaaaaaaaggttttgaggaagcacaaagaaataacagtattatgtggcaggatgtcattacatttcataatccttggcttgaagaacagggtttatatgactcacgtactcatacagtggatgaaaaaaagttaatacaaataacaagacaatctatgaacaaaatgcttgaaagggaaaagttagatggttcagctatttggtcagcagctatacaccacaacacggacaacatacatattcatattgcaacagttgaaccagctcctacacgtagtcggggaaaaagaaagccaaaaacattggatgtgatgaagtcaaccgttgttaatcaaattatggatcgaggagaaaatcagaatagaattaatcatttaatacgcaaagaaatggttgaccaaaagaaacaaaattcttcttttgcatggcgcaatagagaattaaaacccttgtttttaatggtctataatcatcttccacaagataaaaggcaatggcaatatagctacaataccattaaaccattgaaaccttatattgatacattgagtgaaaaatacatcaaaaaatatcatcaaaaagagtatcaacaattaataaagaacttagataaagaagtaaaagaattaaagaaagcatatggggaggggacgagggataaaggacgctacgaaaattataagcaaacgaaaatagatgatttatataagcgaatgggaaatgcttttttgcaagaaatgaaagcttatgatcgaaagcagcaagatgtaaaacgtctgttggatagaaagcaatctggaaatcaaacagcgagatataagcagcatgtacctgtacatttttcacttcgcaaaatagaaaaagcgttcaaaagtgaatatgaaagttggaaaaaccaacagcattatgaacgaatgcaacgtgaaacagaacgtgatcgtaaccaacaaaacgactatgaaaggggctattaatcgatggagaagcaacgaatgaaattagccattgaggatgagtcaaaagcgtatattgaatcatttaaagaggagcatggattgcgctacacgggtgatgccattgcacaaatttgcaaggaacatgaagcatctaaaagtaatgaatggtcattaaagtatattacggaagtagtgagtcatcatctccatgagtccttaaaaaatgagtttcaagctttacgagaagagattcatacattaaaaggtgagatgacaaaaacaaaactaggggcgaacgcagcagataaaaatacacaaattttaattgaatatatgaacggtcttttcttccatcatggatttaaaggattgatgaccaccagtatgcaggagatggatagtacaagagtagcgaaggaaacagttgagaaacgaattgcaaatcagcgtcaaaaacggattgattgggaagaatcgagggggaaacaacaatctcattgattgtttcatataaaaagagatttaactactaaaaggaggaattaatctttatgttttttaacaaagatttagtgttagcttcgattaaagctgtaggagaggatcatgccattgtacagtatcaagacaaagaagtagaggtgaatttaagtccagaagaagcgaaggagtttcatcaatatgtggtgcatcaagaaaatatgttggtgccaatgaatattaaaacacagaagccttttgtggatttagaggaaccttggtatgaacaagaattagaagaattaaagggaatctcctatcaaaaagaggagggggaagatgagtaaaacatatgcgaagaaatctgtcgaagataagcgtaaagaggttgaagagttaacgaagggtatggaaaagaaagttgagcagcattttcattctgccgaagaactaaaagactatttatctttcatgggtaagttttatcaatactccatgtcaaacacagcgcttattcaagaacagttttttggtgctcaagctgttgggtcatttaagttttggaaagataaagggttctccgtcaataaaggggagaaaggcattaaaattcttgttccaaataaaaccgttcccaaatttaaggatgaaaaagggaaatggaagtcgattaataaagccacccctcaagaaaagaagttgattcaagaggggaaaaaagaagtcactcatggccgactgtatttttcagtcggccatgttttcgacatcagtcaaacgaacgcgacggctaatgatttacctaagatttttccaaatcgttggttagaaggcaatgtagaggattacaagacactctataaaggaatggaagctattgctgaaaagaatggtatttccatcattgctcctaaagaagaactaggaagcgcaaaaggtgtatcttacacgttaacaaaagaagttgcgttaaatcctcgtaattcagaaaagcaaaatgtaaaaacacttttgcatgaactcacacatgccaaacttcatacaaaggacacatatctaaactatacagctgcggaaaaagaatttcaggcagaaatgacagcttacacagtttcatcttattttgggatcgacaccagttcttattcgttggattacctctcaaattggacaaaaggaaagacctttgaggataaaacaaaacttttaaaagaagtacatgaaacatcagttggctttattgaaacaatagaagaaacgttggtaaaagaacgagaaaaaaatcggtcaccagaaaaaaacgatgaaaagcagcagcaagcagatcctctttcttctgaaaatgtacaagagaaaatgaaagaaggatatgaagattataaacaaaagcagcaacaggaatcggcacaaaatgtagatagtattttagatcgtgtcacggctgaagagaaatattattcaaccaaaacccaagcgatcaaaaatggatggatgacaaaggaggaagtcgtgaaacttgaacatcagattgattcaaccatgactaaaaacgagaagggggtcatgaatggtcaagttcaggaacaatctcttacttttcaagaccgtatggaagtgggcagtcaaatgcaattccaaaaacgtacaggtacagctagacgaaaaaaagaagaaccggagctagaaaggtgagagagcgtacatgctctcttttttcatgtccaaatatgaattaaatggaggaatcgatcatgcaaaaagtaacatctctttcaaatgaccaatttaaaatgcttgtttccgataaacgagaattaaagaagtttatgaagcacccacaaaatgaaaaaatcgaggcagattgggcgaacatcagtgagaaacagctgcaagacatcccttctggtgctgtttacttaacacaatcagctctaggggaagaaaaaccgcaggttttacttgtttctacggataaaaaaggacaaaaacaagcctacaaaagtgaaacaacacttgattttttaaagagtcatgatgtgaaccctgttttagagaaagatcgagaaacgcagctcaaaacgagctatattacgtttttacaggctcatgacaaagagaaacctcaagatattgatagcatgttagcccgtgtgaatgcagaaaacgattatgtcatgttgaaatcaagtgccttaaaggaaaagcagttcacctctgaccaattgaaaggcatggagaatgagctttctcatcagtttcaagctcgtaaacagacacaagagaaggaccgatatcaagaagattacaaacaagaagtactagaagttatgcagcagcctagtgaagaaacacagtataagcaactgtttaaacaaaacttgttagctcaattagacatatcagatgaaaaagattcttctaaagaagcgaaaaaagaagccgaagcagaaaaagctcctgtcgaaaagcagctgaagcaagaaacacctcaagagaaagaacagcgtttggccaaaatgaaggagtttgaacaaaagcattcctttgataaggtgtacaaattaaaaaaagaagtgctgcaggaattaaaagagctcaatttgactgattctcaacgtgagaaattaactaagcttgaaaaggctttagacacggagaaaaaggatcatgacaagcagaaaaaagaagagaaatcacagaatggatttacgaagttttttgcacggaataatggagcattttcttcaaagaaacggcaagaaacgcaagaaatagaacgctaaaaatggcaaaaaaattggaaatgaatgggggctgaaaagctccctttttgcatagggtgaagtgaaggagggatttaggtgggagaacgaaaacacgtcaatgagggggaaatcatgaaagcacgagatgttgatttgttgtcgtatctggaagccaaaggcgaaacctttgtaaaagaaggaaagtactatcgtcatacggaacatgatagcttactcattaaaggaaatatgtacgcttggaacagccggaatgaaacaggatatggagcaatcagtttcgctcaaatgtattatgggatgtcatttccacaagccgtattagatatcaacaaaggcgattataaagagctttctcagtcgcatgaacaaccgtcggtttcaccatcaaaagagccttttcgctatccaaaagagttagaggtaaaggatcaaagcaaaataaaagattatctcataaaagaacgcaaaatagattctcggttagttgactggcttcttcaaagagatttaattgcccaggacaaacggaacaatgtggtgtttaaatggcgtgaacatggaggtaaaggaacggtaattggggcagatcggcaaggtacagcttcgataaaaaataaacgaggttcttttaaacaagtattaccgaacgataacccacatacaggcttttcagttgatgttggtcgtccaaataatatttatttctttgaaagccccattgatcttctttcttattggagtatacaggaaaataaattgcagaatacgcgccttattagtatgaatggcttaaaacctaaaactgttgcccaatcttatatcgaagctcgaagagaaggcttaggcattaaagaaatggtgctagctgtcgataatgaccaaggaggaaaagaatttattgacaaaatgaaccaaatcgttaatgctgatttaataagagcagatattccaaagggagcgaaagactggaacgatcaattaaagaagaatggaaaaagcattcaacctgtggcatcacgtctccgaaataaacaaaaagaacaggagctttcaatgaatggataaagtgtttcaaagtgtattttatctttttcttatcatcattttatttaagctttctcaatttgcttaccgtgtcattcgtgaacggaagtatatgaaagagctagcccaatcaggtatgccctatattgataaaatggatggttatcagttcgaaatttatctaaaagcactttttcagcaattaggttacaaaactcaagtgacgcaaaagtctggtgattttggggctgacttggtgatggaaggcaaggataagattgtgattcaggccaaacgatatggagttaaaaaccgggtgagtctttctgctgtacaagaagtttatggagcaaaagcgtattataaagcgaatcaagcttgggtcgtgaccaatagttattttacgaaacaggctaaagagttagcagctgcatgtgatgtgactttaatggatcgtgcggatcttcaaaagtttatcaatgaagtcaatcctgttttcaaggcacgagaaatctttgaaaatatcacaccagaacctcgtaaatgtccaaagtgtgggcaagatctagtcgtacgagatgggaatggcactcgcttttttggttgttcctctttcccttcttgtcgtcatacggaaaaaattaataaggaagtaagtaagagcagaccttcggtatagtaaggtctgttttttcttgctctaaaaaggagccgatgttatgagtccatatactagtcttaactgattggtgaagggatattttttatgtataaatcattggattcatcacataatatcagtgtaatggtattgttctctccccaaagggattcaatcacacttaccctatttcaatcttccttctaactgattgagtgggtttttttttatgtgtattttaagacactgatatttgcatcaaatgtacttacgcaaaacaaacgttaattgcgatagagaatgtttctttacatgtcaaaatcatcaatgaaataggtttttgttcataaatgattgttacgaaaaacaccttcaaataaagaaggtgttttttctgttttatatacacatgataaaaagaggagtgtttgagatgaagaatctatttattaaattaatcactatttttacattactaatgataaccctatgtgtggtttcagtggggaaaacagaagcagccagtaaaactgttaatcaagacttcatcattattaataagcattataacttaaattaaggtaataattcataggatagttagtctgctatgtggtctaactatccttttttatttacataatagattagaaaaatgaatattgaaataatagtttaatatgtataaaatgtgattgtagataagagtgttagtttggttttaagtggaggacaaagcctcggtgcgaggacagcactccgcagaaccgttaggttcgaggatcttaaagaaataacgataactagataacattatgtgggaggcgttttcatgagagtagaagaaatatctgttggtaatagaaaggcatatcttctaattggtacaagtggattacctgttgaacctgttgcaaagtatatgaaatacctatacaacagtgagaggagcagtaatactttacagacgtactgtacggctttgaaattttactttacatacttggagcaaacaggaattgattatcaacaggtgagctttgaaaagttatctaacttcgttgtttggcttagaaatccctatgaaaacaataacgttgtactccataaaacagtaaaagctaaacgcagggaaagcacagtaaacaattaccttacggtcgtggcatcattttatgattacttatacagaaatgatttagtggactcagacatggttgaaaagcttatgaagaagatgttcattggtgctggtgggaatgggtacaagggtttcttacaccatgtaaatggagggaaacctatctctaaaaatattctaaagctgaaggaacccaggaaacgcgtccaagtatttacgaaagaacaagtcgaagaaatctattattctactacaaatataagagataaatttcttgtgcggttgctttttgaaagtggattgcgtatcggagaggttctctccctgtttcttgaagatcttcaattcgatgctaaacaaagaaagcacaaaatccaactgaccaatagaggtgaattgccaaacggaggtaaattgaagactggagagcgaaaattagacatctctcagggtctcatgaacctatacgacgattatttgtacgaagtggttgatgaatataacccggaccataattttgtgtttgtgaagatttggggaaagaatgctggagaccccctcacctactccgatgtctatgcgacctttaaagagcttgaaagaaaaacaggtatacatattaccccgcatatgtttcgacacactcatgctacaatttattatcttcaaaccaaaaatatcaagctggtacaagaacgtttaggtcacgcccaaattcaaaccacgatgaacctatacattcacccctctgaggatgaaatccgaaaggattgggagaaagccgcccatgcatttgagattgggcaagaaaacatggaagactttcaatcaaatatccctgacgaagcagttcctttttagaagctagttagaattttaggaggcaatttattggataaaatcatagcaaacaatgcaattacaaaaaatgaatattggaacttaatcacatctactctctcctcttacgaggttaaggatatatctcctgatggaaaagtaacaaggagagtcgtgaataatgattactttttagtcaatgatatttggaatgtaaatgatattggtaacatccctaactttgaggaaagcttcaacagatacaaagttcctagtaggaatcaaaagtttccaaccgaaaacaaaactattggcttagaacttaaatttgtttattattgtaagttgtttaacgatgaatggagtttaaacagcttttttcatacttacaaaacattcctaaacaaattagttttatttcttaacgaaaaacattctcacctctattctctccttgatttggacgttgagaaaactgagaaagagtggatttggtggttgaacaacaaaggtgtaaaaacaaccctagcaagaaaaagtgtgcagtatggtgaatttgagactaaaacaccaatagcgactttcttccgttccatatatgagaaattatttaatctaaccgatacccgtgaggaatggggaaaagatagatgggatgttagggtgttaaatgccaattatggagtagattacaacgcctcactaccactttattatattgatttcacaaaaattgaaaatgttacttttagacaatatttaaaaaaatatattaaaactagattactaggtggcaggaaattttcttggtcaactgctcaaaattatgtgagatgggttcccaagttctttaattttattaatgaattagaacctgaatgggatgatttaaaagatcttacaagacagcatatagaaaagtatgtagagtttcttcatcattatgcccaaaataacttaaagaatagaaatgccaacccggataaatttatatatataaacgtggagtgcacttattcatttttaagagatacccagcgttacgattacagtattgcacctaagaaatcaactacaaagttactttactctgaggattatccttctcttgataagaaatcagatgatactattgattacattcctgactatgtattagagcaattatttgacaatataaacgaccttcattcagatgtacaacctgtcgtgtggattgcttttaaaactggattgcgtatcagcgatacattaggattaacacaggagtgtttggttcggttaaatggcaaatattctattcaaaccgatattgaaaaaatatatgtgaatggtcataaaatcccgattgacgaccaattagcaaatatgattgccgttttaatccataaatccaaggaactcagtaacgatgataacaaccctaataaatacatcttcgttcggtacaaaggttcccgtaagggaaaaccattttcccagttttgggtacgagatcaacttggaaaactagctttcgaaaagaacattactgacgaagtgggcaatgtattccatttcaaatcacaccaatttcgacatacatatgcggtcaagatgttgaatggtggcgctgacattttaaccgtccaggaattactagctcatgcctcgcctgaaatgaccctgcgatacgcccgtttattggacgatacaaaacggaaagcgtttgaaaaggtggttaagcaaggtgtattttcctttaacctaaatggggaaattcatcaagtatctgaaacagaagatatccctgaagacattctagatatgatgtggaaagatgaaaagctaaacgctttggacaacccctacggaacttgtcgtgctagagtgaaaggaaactgcccattagcagcagaacctccttgtctcacagccaacgatggaaagccttgttttgatttagctgtaggtatgacgagttttgacgttaaaaagtatgaacttctaatagaaaccactacaaagtggattgaagcctccaaaaaatatggtcgcgaagatatggtcaaagctaatgaaaaaaacttggagagataccagagcatttatgaaacaatcaagggtgggaatgtaatttttggaaaatttgaacgtgtgaagaaacagttagaaagaaaacagaagaaaggtgttaaacatggctaattttgaacgtgaggagcaactacggcaactacataaacagcgaaaacaagcaactaaagataaagttgaggaggctattaaacgtcttataaagagttctaaagcaataaactttaatagtgtggcaaaagaagcaggtgtagcgaaagctaccctatacaatcatatagaactcaaagagcgcattgatttcttgcgaaatcaacaagaaaaagcatttgtggatgatagaattaaacgggatgaaaataatcagaacgcggtcatctcttccctcaaaagaagaattgaaaagttagagaaaaaaaatcaacaattagaaaaagaaaatagagagttgcgccaaaaagaaaatgaaaagctcaccgattactttacaaagttataaagttaagccctcacatattagacatatctaaaatgtgagggctttttattttcaacagttttacttgtctaacctaaatataatacaacaaacttgcttattttcacaatggctatatagaagttattaatccagtggctacgggtaaaacatgggagaaaacacctgtgggcatctttaaaatcgtgaacaagattaaaaatcggccttattatacaggacatattcctgggggagaccctcgcaatcccttaggaaaacgttggttaggactagatgtaaatcgtacaaatggcaatacctatgccattcacggtaataacaatgaaagtagcatcggaaaatacgtgagtcacggatgtgttagaatgcataataaagatgtggagaagctttacgagaaagttcagattggtacaccggttgcgattacgtattcctataagagctttattgatctcactaagatttatggatatacgtttaaaggctacaagttaaaaaacaactaatgattaggcagcattccgttatgacgggatgctgttttttctttgtcttctttctatatagcccttatcatggaaatagatgaaaaatatggtgaaggaggatatggttatgcgagcaaaaatcgaaaaggctaaacatgtggtaatgtttagagctacaggagagttttatgcgcatgaggtcaatcaagataaaataagaataggtttttttgtctgtccttcatgtgaagtcaaagtacattataaacacgatcatttcttttcccgtgaacataaacgaaattgtatctatgtgaaagaacaatttaagaaaaaagcctactaggtaaatgaagattcaatgattttatatggaactacggggaaaaggggggaaacgacatgaaaaatcatgtttatcaaaatggacgtttaattcaaacgaataaaaaattttcagcattaaagcaaaagcagaaagaatggataacgaacgaattaagacaacgttatattagtgcgatcaaccaccctcatgtcaaactaaatcccaagaaacgagatcaaattttagacgaagtttatgatcttattgagggaaaagaaatttggataccttatggtgaagtgaagagacactattttagcaaaatcccttcgtttattcgtaagaataagaaaatgatgcaagaagaaataaaaggtgaatcataagatggctagagtagttatagaatgggactattttaaacattcgacagcgttgagactacataaacaggctaagcttgttttagtaccatttatatgatgtaggaaggagcacttaaggttcctttgttggattgataaatctattcatagaaaatcaaatgaagtagaatattgcagcaggaaggggagaatataaaatgaaatcaacaggtattgtacgaaaagtagatgaattaggtagagttgttattccagttgagctaagaaaggttcttgctattaaagaaaaagaccctatcgagatctttgttgatgggaatcaaattattttaaagaaatacatgtcttataacgaatgtatagtaacaggtgacatcactcctcaaaatagggaatatgcaaaaggtttagtgctaagtccaagaggggcggaaattttaaagaatgaaatagagtttaagttcaatataaaagcttaatttattcatggttttatggagtagaggtaatttttcaaaggcttgaagccttgataaatctataatgtgtaaaattatgtataaaggataaattttgatgttacgtcatcccttgtctcctgaggggtggcgttttgtttttatttctttcctgctaagagcttattttccaacttatatatccatttataatatcctaatacaataagtaaaagtaaaggatccataacggctgaatgccatagattccaccaaccgtatttaaagtatccccacggttcaggtaataatgtgatggcttcataaagtaaaatagctatcatccaataaaaaatatacataatacgtttatgaaaggcttctccagaaggataccaatttagaaacatcatattcactggtggaatcaatactgttaatgtaagaatttcacgccacccatcaatatctttagaaaagtaccaatagccatgatattttgtatcaatatataaatcgccgagttgttgcaaagcaattgtaaatgcccaaatatgtacgatttgatttgccgtcaatcttttatttgttttaaacgcaataaagttaaacagaataatagcaataataagtcctatcataaggttaattttcccttttaaccaaatataccatatactgttaattaaagaaaactgctagttactttatttcgaatttatctttatcctgttcactccaagatcacacttatcgataaaaagacagtctaaaaaagtacacctttttagataccgaaaaaatcaataatgaaacgtctatttaatttttaaaatagatgtttttgcacgcacaaaaagtaattaatctttatagacaatatgtcatattcaatttcagttgccataatgtgagttacagagataacaaaaagagcccttattccatgaggactcttttcatctataattaaagtttttaaaatgtatcaattgatgaaagcaattcttttaaatcatcaattgcatgctcatcggtaaaattctgtccccccaaaacatctttttttcaaagcctacgttaagacacttttaggaaataaaaccctgatttatctacgccaagtagaagaatcagggttttattttgccttcttattttcaaactttccgatcccaaaatactatcatcttaaactaacacaaccgtttggttaagtacatatttccacattctttatttttttggctatgttaatcttccacttttacttttaatatgaatgaaagacttaccctttgccaccaacaactaatgctaaaggtatttacgaacttttttacagtatgcttcatattcttcaccgtaaatctttttcaaggatttttcttcaagttgaacctgacgattaaaaagccaaattccagtaaatacgtacaataataatatccagtttggtaaaattaagaatatccctattaaaacaaatccaaaagctgtgtaaatgggattacggctaatcgtaaaaacacctgttgttataagttcacctggtttttcttcatcaattccaactctaaaacttttcccaaatgaaattatgcttaacgagaataatactaaacccatcgtgcataaacctacacctatccaactaaagacttcattgctaaatagtttggtacctagtttgggcaaatcaaaaacactagagaaaataagataaaaaaacagtaatgcaaatgggataataaagaaatcttttttatctagctcaccaaatttaaaagctttaattccctttttccccaactgtttagcacgaattataaccattatcatcattaaaagtaatgatatgattgcaaaatatccttgcataactctccccccttattcatttaataaatgattgatattttgttcattcaacgcagtatttggaataccttgtgtaatttaaatttcaagcatttataagaattaattttcttactggttattagttataatcatatttaggaatacattcttattttcaaaggggagtatctaataagtgttgaaatagagttccttccaaaaagttatataagtgaagttcccgcaggaggtggtttttttccttttggaagagatggagaagtgccttatatcgtagaatacgagggtcaagaactggatatagaggtcttttttaataattggatggcacagttaaacaaattcccccaaaatagagataaatgcagaggaaagcactcatgtcatagataatttatgacatgagtactcttcatacaaaagggttatcccatccaagcttttgctaacaattgaattgccgtatgaatttctttttcagataggactgcaaagcctaacagaacagtttggttattattctgcccatattccgatactgggtagactttgatactatattttgctgcgctttcaataagttcttgttcactcataccattatttggctgcattaaaaaatgtaacccagaattaagcccaataacttcaacggagtctggaaaataagttgaaattgctgcgatgagtccatctcttttttttctgtaaacaactcgcattttattaatatgtttttcccagtagccttcctgcataaatcttttaatgatttcttggtcaaggcgtgatacagactgaacgaagctaaagtgatttttatgaaaattttcaattaatggttgggggagtaccatataacttatacgtaatgagggtagtaatgcttttgagaacgtccccatatagattactttctcttgagaatctaaactttgtaaagccggaattggctttcctgaataacgaaactcactgtcataatcatcctctacaatgtaacgcccatcttttttttgagcccagtttaaaagctgtttccgtcttgaaatggacataatcattccacacggaaattgatgtgatggggtaacaaaagctatgtcagcatcactatcctctaatttagatatcattatcccatcatcatcaagggcaattagacgtacatttgcgttccccttttcaaaggttacaagtctgcgatgatacccaggatcctccacagcatacaaacttccttttactagcctaaataaaagtctaataagtgttggtgtacctgatccaataattatctgacttggtgatgctcgaacacctcgagacttgtaaaggtataaagcgatggcttcacgaagatcatattctccctgaggatgtcctatccttaataagtctttattttcatcccttaatatatcattagatattttcctgaatactgtaaaaggaaatgagtaataatctacgcctgtttgagtgaaatcaaaggcgaaattatttttataggacttttctttgatatatataacgctttcttttaggttacgaaatgattgctctattttacatacaaagtaccctttacgtgaaattccttcgatatatccttctgcaacaagttgctcgtatgctgcttcaatggtattttgactaacctgtaaatgcctagaaagtttccgtttggaaggcagcttagagtagggtgggagctttcctgtttcgatttcctgttttataaaactatacaactgtacatatagaggttttctactatgtaaatcaagcattggtgttaattccattattttaactgaccccttcgataaagtataatgtgaccctccataaaaagccaggtactcattataatatttttataaaattatttctatcttcatagaaacatctcaacaagggggattcatcatgaaaacatcgcagcatattggatttttaatggttattagtgggactgcattatggggagtctcgggtccaatgatacaatggctctttcaaaatagtagcctcacatcaagtaaatttctcattgtaaggttactacttgccggcattataactttgacactactatatcttactaaaaaaaatatatttggtgtttggaagcatccaagccattgggtccaactaattatatttggtgttctagggatgcttggcgctcagtatgcttttattgaaaccatccgtgtgagtaatgccgttacggcaatgctatttcaatttcttggtcctgttttaatcaccatttacatcacaatacaaacaaagaaactaccaacgataatacaactattggcggtcgttgcagctttagtgggaactttttttctaattacgaatggttctgttgaaaatattgtattttcgaagaaagccattatccttggtctacttacaacactgggctttactttttataccctccatcctagagcattgataaaagagtgggggaccgttatcatcgttggctggggcatgttaattggtggcattgctttacttatatacagcgaaggttttagtgcggtacatttgacacatacattaacatttaacacgttattaatattgtttctcgtaattattagtgggacgttatcttttatcctctacattggtagtcttaaatatttaagcgcaacggaaacaagtctattatctagcattgaaccactagttgcagcagttgtttcaatcatttggttaaacgaatcatttggaatgtatcaactgttaggtggacttcttattaccgctgcggttgttcttttatccatgcacaatgaataagctaaaaaaattgaaatcacaaattcagcagctatttacatacgatagtttatattatatgaacttacctatccgcaatcacaaaaatggtttatataatcattattaacagcattaaactcataattggaataacactaagaaaatgtggatttataagactaaagaaattcaaataaaacaagctaaatttctcatttatacaatgagaaatttagctttagttaattcgatatttttctcaatatggttcccaaagctaatcctggtattacacataacatgggcagccaaataggtcctaataataccccaaacagcttaacgctagaggaataaatacatcccagcgtaacaaagtaagctgcaaacacaaagggaagaaaagcatgcctgtcttttcctccacctatatctttccaagcatcccacattgcaaaaaaatataaacatggataaaacatcagccatcgataatcagcatgttggatagatttttcaatatctccgtgaaaacttaaaataatgatttcgttaaagtttgattgaacattaacaactaattctaatagtatcaaaatggaatcttttaaaaatttgccgtttaaatactgtccgaatcctggaagtgcaatactccacaacaatgcttcttctttgtttgccacattgttttaatcctttgctaaatcccttcgattagctgctaaaggtggttgttctaaccactcatttgcaatcataatattagcaccatcctcagaatactttagaatttcagctattaaacggtaataatctacatccatatccgtcctctgatcttcagaaatagataccccatagtttccaattccagcataaatcattaaactaaaatgaaatgccattaatttatcagaaaaaggtggttcttcagaatccgtgatatcttggtcatatgacataggtgttggtagtgaacacatctccaaataactggaaaaagctttaatatgttttaatgcaatttcttttcctcttaggaaatatttacgaagcttatcggattcagcaacttgactaaaggccgtagctaaagcagtacctaaatagtttgtttggatatttgcatacagattatttacttctgttcctgtgaatgctcctcttcttcctagaccctctaaaataaaggattgtttatgtacaaattctattttttaggatatggaatggtaggtggacgaagtgcgattcctttctctagtaaaagattagttaccttggtatttagttcaatggtctgcattaaacaagtgttaaagaaagtaagaatatcttgacgataaatgttttgtatcactctaccgtaagttactaatcctcctttagacatgttcttaatatattgaaggtaaaacacatcagaaaataagcgcttggcttttaaattaatatcagcttcagtaaaaccttgtggaatttgaatatcttcctttgagtaaatctcacgaataaagttaatgtgtttttctgatgattgcatggcaaaagtaacgatagctttaatttcttcatcttcgatatgttgaagaaaatgtttgaaaatacaaattgacatactatccgaaagataagtcgtccataaataagataatttagaagaagttaacataacatgattatgtttattttccataaaacaacctcctattcaatatatccatatataatatgtccaaaagagaaaaaactataaatacagccctataacaatacattcaacacagagaaaatgtcttagccgattaatagctaagacatttttatctatctttattttccattccttcttatgaatcaatttttattctgcatttattattctttctagtatttttattgttttatttaactctattattatcgataaccttttaaaattgaaaaacacagaacatagtaaaataaataacacctcatatctgaagcaaactacccaagacgccgtgaggcatctaccacttttcttattcgaattctgaacagaaaagacactgattagggttagtgttttctcggtttttaagttgtatatcgtatgcatgtttagttaccataatgtatctctccggaatacatcaaaaaacctcgcagggcaagaaatcttgaaaggggacaatacataacctaggattaagtctgtccgatgatatagtacaaaaatgtacatctttttaaacactggaaaaccactaacaaaaggtctatttaatcttagaaatagaccttttgttagtggtttttatatagctaaactgtctactaaaaacaaggatgattttagtaatgggaattaattttggttatattcgtgtaggtacaaatgaacaaaatttagatagacagttagaagtaataaaaccttatatcgcagatggaaagtatatttacaataataaggctagtgggaaggacatggaacgcgtgggctttcagaatatacttaaagcaatgttaactttcacaacgtcaaatccatgctaaatttaccttaactatcctattccttattaaggaaattagcttgatcttaaaaggaagtattaactttttctaaaagaaatatataataaaggttttaaaccaggaaaagaattaaaagaagctgttaaataaatatgccttttaatcaagccccctctggagatagacttctaaagggggctatctttcatggtgaaaaacttctaaatacctacacccaaatattatttaatcaaggtttctattttcttgcgtcgtcttagagttggaggtaggctctttgccaagtctagggttccaatttcctaacttgttttttaagtaatcctttaaaaaatcacgtttcttttttcgtcttttatccctgtttttcataaggactcaccgcctttaggttacttaatagatgcaatttatccttattataattatgttgaaaaatccactctttatgctaaatctataagtaataagtagatcatcttactagtcaaaggaatacttttaggtattggttcaaagtattccaaaagacgcttcccattgtaagagtaacaaaagtagaacgtgaagaacaaccagatgatcctcatatgtatcgtcataatcaataataaagaaagcaggttaataaatattaacctgcttttcagactaacgagaacttaaaagatttctcgttagaaaagactttatggtttcgtagaagaagcatcctcattctcagaggtagaaactttatcattgaagttagatagatgttttccttgcacatcattgatatttgcttcatcagaagtatatccagcagtattaaatctgtcatcccctattgcaggctgagaattgttagactgatttttcatcgtgtacctcctagtttgggttggataggtttaatatgctcatattcactgtatttcatgaggatgcacttaacgttttatctctattcagtcgaaagagttggatatttaaccaatataaagattaaaatgtttcattaaaataagttttaattattacatatnnnnnnnnnnnnnnnnnnnnnnnnnnnnnnnnnnnnnnnnnnnnnnnnnnnnnnnnnnnnnnnnnnnnnnnnnnnnnnnnnnnnnnnnnnnnnnnnnnnnatataataattggattttggattatgatcgagaagaaattgaccttttatttaagtgaaaagtaggattcatccactaattagcacattttttatatccataatcacctgtctcacagtaactaaaaataaaaaaggtatctacaatcttctaggttaattttgttatataatcagattagcattaggcttatagctaaatggaaatccaaataagattaaggtgataatacaatgatggaagaactaaaaaataataaaccgacagcagcttggcaacaaagaatggaagatgatgagattttcactgtagagaatattaaagccactgatgaaattcttgatacttatattaatagacttgaaggttctgtagataaaatgtcagaacaagatatcttagaatatgtacaagagatagttataggattaaatgagttaaatgaacaatttgattatttcattgaaacgttagaaagagaagaactttgcgagtttatcatcaaagctgcaaatgcagctggcttagagactgaagaggatatcacagaagagtggagagagtggtaacatacagatgcttatatataagagaatgaaatatggattctaagcagttatttctagttaccataatcatgactctaggaagtaatgtaaaagaagaacattctatgaaatgttcttcttttataaatgatcacagtgaggtatagctgcatacaattgtaggtgtctttttgacacttaaatttaatcattctaatggccatgaaataatgaaagagaatattgataaacataaataattacgaatcctagcgaaattaatagccatacatgcaatttcctgaagtgcttgatggtatttccaattatttcatgaaagataacaaaagacagtgtaccgattgctgcgccagtcgacaaagcttgtagtttaagtgaggaaacttgtacactttcaccaatgaataaactgcctcctaaagacagcgacagaatggctataattagtaaaaagaaggtgttaggtatttttgctatagagaggactgtcataattgccatcccctctgggacctgatgtaaaagggtagctgcgaatacagaagctgattggtgcatatctgttattccaaaggtaacacctgtgatgacattatgaaaaaagatagcaaccgttaataagataagtgcctgtaagggtgaaatttcgctgttttgtttatgcaaaaagaggtcaatgcatagcatgatgatatatccgactacaatccctaataaaacgcctcttaaatcatatagatgccaagtagacggaaggatatcgaaaaacaataagcccaataagattccaccgcatatagcatacataaattggattcttccccttgccagatggtttactaatttgagaagtcctccacctgctaataaacccagtaaagaacctaaagtaaataagatattcatttctatatgcataattgctacttcctttcggctatatggttttgtacaactaacctattcaaaggaaaggcaatcatacctatgttttataaatggttaaaaaaaataaaagcacatgatattaacttgggagtaacttttaggtaaatcactaataaaaaaggacatactaacgttatctaaaaaagaggtgttactatggaatctccttttgaaatgataaccaatgtggacaaggtcgaaaatgcttattatatagaagtgaaaccaggggagtacaatgcaaagtattggaataaagaatcggtctattttgctgatgaagcttttgcttatttctacaccactatttgcaagtatgtgccacagtatcaacctacccaagtgacagaaatcaaagcagaaacatggctgaggatcagtaatcagctgcaagaactcgcatattttttgagcactaatccgcctatgattaaactaaagaaatggattgattttagcaaagtaaaggaaacgtacaaacagtttgatcatcacaaaaacaagtacattcgtgagttaatcaacatgattaacgaatttacagtgtggataacaaaggtatgtcaaacacaatcgtacatcaccattttgggcacttaacgggaatcgatgttgcttattttaatctacaagctatgcagaaaatgaaagaattgctcaaaacgaatatggcatattacgctaaaggaataaacgacactcacagcgaaaagagctataagaagatgcaaagagtatcttgcatgaaaccttagaggcttggaatgaagagcaaaaatcccaaaaacaaatcgtgagttaaatcactaaaaatgctctcaaatgaagcaagtgattctataaatcaaaaaaagatactttataaagtatctttttttgatttaagtttttgaagaatgtaaaatctaattggtatcattcggtacttcaagagaagtaggtttggtgttctttttgaaaaatgaaagaattaccattacaagaacgaatgctacacaaactatagagcttaacctattcgcactgtctatgagaaagactatgaagctaataattaatgtacatgcggcaaagagcgttaaataagggaagccccaaagtttaaaatatggtttttctttatattgaggacgtagctttagctgagctaagcaaatactaatccatataagagaaactgtaaatccaggaatagctaataaataagaaaaagctttttcaggatataagtatacgaggtacgttcccaataataaaaataggacactgaaagctaaactgtaaacaggtacgccttgtttatttacataggacaaacttttaggagcatctcccgactgagataaagaatgaagcatccttgtacagccataaatacctgaattggctgctgaaaggacagctgttaataaaataaagttcataacatgagaagcaccttgaagcccggctgtttcaaatacctgcacaaaagggctagcatttgcatcaattttatcccatggtatcaagccacagataataaaaataggcaaagtataaaacagaactactctccacataacgcctttaactacccctggtaataccttttcagcatctttcgtttctgtaatagttaaaccaatgagttctgatcctccatacgagaaaatgactacaagtaatgtagagaaaacggctttccagccatttggtataaaatcactataattatgaagataatgagaagatgaattattgcttggcataattccaaatagtatcgctatacctaataaaataaaagcaataataacaaagattttaataccagcaaaccaaaactcaatttctccaaaagactttacgcttgtagcattaattaaaataagtacaattgaacaaataagacaaagaatccataaagggatagaagaaaaccaatattgcagaaaactacctgcagcgatgacttcaataacacacacagtaagccacataaagcaataagtagctcccgttacaaaagaaaaacgtcttccaaaagctttttgaattagatctttcatattgtgcgatgggtatacaatagccatttcagccaaagcccccattacaatgagaagcaatagtccagcaaatagatacgaaaagataaccgaaggtcctgctaatccaattgtatcagcactccctttgaaaatccctgttccaatcattcctccaatagcaatcattcgaatgtgccgcggtaataattgcttttttaacgtattctttgatgcagtattttctttcatgatgccctccttttaacataaaaaagtccctgctgaattattcagcagggacgaaaatttcgcggtaccaccctatattgtaaaaacatcttacctcttaattagcataacggttttatccgtcctctctaaaataccattagaagaggaagctctaggagtgaatttcatctctaatctttgtactgacttccaccaattatcagctctctataacagggagattaggattacttaagatcctatcttagcttttgtttattaaattaaagtgtatgtaatgtatatcatcatagttagtttgaaattaaatgtcaatatgtttttatctatttacagctataagaagagttattagattttacacaaagataacaattaccattattcagtatttaatcattccttttcccatcttttgtactgtgattgaattgtacgcttttctataatagaaaacctactgtgcaaacaagagtacagtaggtttttaaatcagaataaaaatggtgagaaaatatctcagtattgtattttgtcctaaagaatataacaaggcaagagttattcttttcttttacaacatttgaattatgaatatacaaaacctttaataataggaattttaaaagtttgttacttcttataattcatattaagtgaacaaaaaactcctctaaataaaaggtctggaggatatttttatagaagtatagttaagttgactactgataccttgtgtaatgtcgataatgaattgggaaatagggggagtttcaaatgtcacatcactcattaaaattgtacgattaccatgtatgggcaaaccaaaaaattttcgaccgattaaaagaactttctgaggacatttacgaaaaggaaattcagagcgttttttcttctatatcaaaggtgatggcgcacatttatgtctctgacaacatatggttaaattgtatttctggtgaaaagtttgatgaagcatctgcgtcggctaatcaattgagagaacagattgaaacgaaaaggatcgaggaagtagaaacgatgtttttcgatttatctgacaggtacaaagcatttctcaatcctcaagaagatatagaaaccgcctttgtgctggaaacttcaattgctggacgactcgaaacccgtttatctgatgtagtacaacatgttgtcaatcatggaacatatcatcgtggcaatattacagctatgctacggcaattgggccatcccggtgttatgactgattatattttatatttatatgaaagggatacaaaagagtagtttctcctctatctaaaaggggtagggtcaggaaatgcggatttacaatgttaagggaattctaatattaaaaggtccaattcctaagtattaaactagagaaattgagcttttttcgttcctccatttttatatttttataagaaacgaaaaagcacctcccgtacaaatagaaagttgctttctcgtcacaatcatttataaataaaaacctagttaatcaaagactttaaaatgcagagaaatgctcgctgacaaaattaacttttgtttttcatataactcctgattcaacgcaaacttgggcattatagaaacctttattttcttgttatcaatttatttttcaaactgaagccagagcttttatatcttcaacaatttaaagatatggaccattttgagagagaactagaaggatatatacactattacaataacactcgaattaagagagaattgaaaggcatgagtccagtcgaataccgtactcatgccaactacgtttggagatggtacgataaactggacactaaattaagagaaaaaggtgattcggtttatgggtagaaaagtttatgatcgtcaatttaaaatggctgcagttcagttggtactggaagagaacctatttgtaaaagaggttgcgaaagaattatttattcatcctaatacgctatatcgttgggtaagtgaatacgaagaatatggggaaagtgcgtttccaggccgtgggagcgcactttataattcccagtatgaaatgaaaaagcttaaacgtgagaatgaagaacttagaaaagagcttgatctactaaaaaagttccgggtcttcttgaagaaaaagaatgtgtaaggtttcaattcttaaaagaaaataaacacaactataacatcaagaaggcttgtaaaacgttaaacatctcacgatcaggttactatgaatatttacagagaaaaccttctaaaagagctttagagaatgaagtgttacgtgcagaaatacaggagatatttaaggaacataagggtcgatacggatctttaagagttacaaaggttcttgagaagaagggaatcaaggtaaacagaaaaagagtaggaaaactgatgcgtcaaatgaacctatatgcgaaaggaagcaggtatcgctataaacgttataataaaaaatcaccttctatagaaaggcccaacctcctaaatcaagtttttcacacagacggacgaaataaaatatgggtcggtgacattacctatatccctactcaaaagggtacgttataccttgcggtatttgtggatatgtactcgagaaaagtgagtggctggtctatgagtacacggatgaaagattcccttgtgatagacgcttttttacaaggatataacaaagaacatcctccaaccggattaattatccatacagaccagggatcccaatatacaggtagtaattttcaagccatactgaaaaagtatggtgctgtttcaagtgtcagcagaaaaggaaacccctacgataatgcattaatggaatctttttataagaccataaaaagagagctcattcatggtgccaaatttacaacaccagaacaagctcgaaaagaagtatttaaatatatagagctctattacaataccaaaagaatgcattcttctctgcattatctttcccctattgaatacgaaaaagcctattcatcatagtatcttaacttagtgtccaataaatattgacaagtccacaatcattagagtttctttgtctaacaattggggtgcagttcactgaggtagtttttttgcatttaaaaatgcatactatatgcttttttagtttgtataacagcaattatcggcaataacatgctaaaaagtcctttttacttaacgcaaatctatcgtttttttctagggcttaaaattaatttgattcctgttcgttcttcattatcgattaaaatatatgtaaacccaggaacacaaaccaaatcaacaccactaggagctacgaatccccttgcaatcgcaacggctttaatcgcttgatttaaagcgccggctcccattacttgaatttctacattacctctttctctaaatacggctgtaattgcacctgcaactgaacttggatttgatattgatgatactcttaatatagtatccatataaagtgctcctcctgttatttaatcgatttatttgatcaatggaacgaatgtaattgacgtatctttaaatcatatccatatcccgattaaactgaactattaaaccgactcctaaatgggtgcctcaattaaaggagttaagacatatatctcttaacttttgtttatttcccgaccattcccatgataaatggagtaagatcactcaactttattttattgctaagaacctttaaaaaaacagtagagacatgttcaggtataggtgttcgactatctacagttgctgtcaaaaaataatataaaaaatcaaaatgatttcctcttctcatggcatcactcaaataatgagcataaagattattatttaatagcttcccctttacgactgttccaaaatcatacaattcattaacagttgtattcacaatggattcctccttctaaaattcagacggttaaaaacccgataccacatagttactataaactgaacgagaacactttttaacggcgtgtagaagaaacactctactttctataatgaaaatgctacgtaatattgcagggggaagctgttacataagtgtattatattagaaaacgggaacttgtatgaatacgcgtagaagatagtggagaagggaaaagttatccctgtagtaaaggagtgttaatcccacgggcaatttaattagcttgatttgatgatttttgcacttaccatattaagaggactaaaaaggaatcattgataaactaataattagactttctccttaccagctttaaagaaaattaggaagttttattttatatatattcttttttaaactaaattcccctgctctatctcttctagtaaatctttaatctgtttacataaattaatcctcaaatttaacattacgcttgcttttgacatcaaattagctccctataaaaagatttataacagcaataaacgacctattcattcgattagaatcataaggtcgcctacattattttcattttcattttttatccttccagtttgctttatttataggtttattcttttatattttcatcttctaactgtcttagattctcctcgtcacattgtttaaataaataagtaaggtacgaatgtagttcaaatcggtcctcctcaataaaatcagaccatatttgtttgttttctctcatcattctataccaactttgacagtcataatatcatggcaaacaacatacttaatgataacgtgaaaatagctgttatcatcgaggtagttacgatattagtttagttcaaaaaagaatggtcaaaggaggggatgaaaagtgaattcaaacaaaaaagcagcaaaaatggtgggggtattgtttatacttgcagctgttacggcgataataggtctcattttatatgaccccatcttaaacggtcccgactatcttactaaaggttcccaacatgccaaccaagtgatagtgggaacacttatggagttaatccttgtggcatcagccatcggcacttcaactataatgtttccatttttaagaaagtataacgaaactatagctctttggcacgtttgcttcagatttcttgaagcagtgattattactgtgggtgtaatcagcgtactgtccttattgaccttaagtcaagaatttgtagcaacaggaactcagaataccgcctcttttcaagcttcaggaactgtattaaaagcaatacacgattggacatttttacttgggccaaatatcatgctaggtataaatacgatgatgtacagttatatattttatagatccaaacttgtgcctagatttataccaatcttaggtatgattggagcaactcttgtttttatagcaggcctattagaaatgtttgatgtattttctcaactttctgtttggggtgctatattgtcgctaccagtagcagctaatgaaatgattttagcagtatggctcatcgttaaaggattcagtgaatctgcacttgcttctttggatgaaaaaaagaaagccacgagatagtagcgaacacataattagcttagtaaagaactgtatttaaactaactgcagttttaattgtataaaaaagcttagcttgtttccaagcatttctctttgtgccgaatataaaacttacttttgtcagagagcgtttttcctcatgttagaatccataattaaataaaaagaaaatgaaaagctcaccgattactttacaaagttataaagttaagccctcacatattagacatatctaaaatgtgagggctttttattttcaacagttttacttgtctaacctaaatataatataacaaactagcttatttttacaatggttatattgaaattgttggttcagtagctacgggtaaaacgtgggataagacacctgttggatttttaaagtggtaaacaagattaaaaaccgcccttattatacaggacatattcctagtgacgaccctcacaatccattaggaaaacggtggttacgattaaatgcaaacggtacgtatggtgatacatacggcattcatggtaacaacaatgaaagcagcattggaaagtatgtgagtcaaggatgcgtaagaatgcataatgcagatattgaaaagctttatgataaagttcaagtaggaacaccggttacgattacgtattcctataagagctttgttgatcttacgagcgtatatggttataaaatgaaaaacaactaatacctgagcagcattcccaagttcttctcatgctcatgtgagtaagtatctatttggggtaacttaacacaatgggaaaatgaagatttgttcggtacattaactgattgggaaacatccggtaatccattcgagactgaacaattagatttgttcgtctttgaagaagcagaatcagttgagtttccacctataaaacaagaggaagacacaagatcactttttctagtaagagcataggttaaccctcttgtttcttttctataatgttaataattgcaattactaaacgactaaataaagctcttacattaaggctaataaggctgtaataccacttccatcctttttgccacttaattagtttcgtatatttttctgcccataactcaactaaaaatagtgaactgatggtaagtacaatcttatatacaatcttaaaaggattatcattttttgttaaatgataaagccataaagaaacagttggtaaacataagaaatcaaataaaacattcgatttaaactctttaggtataaagcgtatagggtattgaagtatttgacggttaactagaaacctgtcaacgatagcatttgtatatccattcataaataagaccaatagtgaatctttgataggggttttctttaaaacgaagggtaagctacctaaaaatatgacggttatacactttagaaatcgtctttctaattttttacttttcatatagtttcatctcctttctgagtcgtaaaattagtattagctgttctatgattgacgatgcaacagtttttcctttgttatgaaaatgtaacagaataaaccagatcaattttttcaaatggttacattcgttcggtgtcaaaaaactgaatattgtccattgaagaaaaagctaatcccttcttttatgtatttattatttcacaccttatcttttcgtaaatatttagaatatgtgatagcgtttttactaacttaaaacctctttaagtcatttaagcaaatgataaattacttttgctatagatactttagtatttacatccnnnnnnnnnnnnnnnnnnnnnnnnnnnnnnnnnnnnnnnnnnnnnnnnnnnnnnnnnnnnnnnnnnnnnnnnnnnnnnnnnnnnnnnnnnnnnnnnnnnntcctaagatatttttttttttttcaagcagaagacggcatacgagatttctgcctgtctcgtgggctcggaatgtgtataagagacaggcgtaatcatgcatattacatattattctatgtctcacttcatctatcaaccttgcataaaaagagtgcaaaagggaatactgtttgcaaaagagaaaagataaaggggttgacgttttatgaaaaataatgcaattaatgaaacgaatcgagttgattcaaatttacgcaatgaaatgttggctgaacggtttttggatcaaatgatgaatgacttcaacagaagtaagattctcaagggaattgataagtccttaaagaataaagataaagaagcttttttacgtttaacagagaaacttaaatctatgccttgatcaaggagatattattataatagaagaaacttataaaaaaacctttacgtgtttagtaaaggttttttcttaaaaagaattactttacataatcctttttaaatatttaactaagacttattacaagaaaaacaattgtaaatctgaatgcttttttgtattttttaaaacttatttaagttgaaaatcatatacgagataaaatatcagagaatcgtaatacagcatcctttatatgttttttctctaatcgagcatacgtaaaacggacatatccatctggaaagccatacacacttccaggcatgaatagaacattattttttatgccttcctctacaagcttttcatcactaattttttgatttattttgcaccaaatatgaagtccgccattcggagaaataaagctaactttctctcccagaatctcatgtaacgcagaaatcatcgtatttcttctatccaataattcttgggttagggccttacggtgagttgtataatcagctgattgtaaaaactgatttgctattaactgaggaaagatacttagtccaaaatccatttgttggcgggcatctgctaagcgactaataaccgattgtggaccaattagccaaccaattcggagaccggaagcaaccactttagaaagagaaccaatatataatacattaccattgtaatcgaaagatttaattggagaatgtttttcttctttgaaggagagcaaaccaaatggatcatcttctacaattggaattcctaacctttcggcaatctctattacttcttttcgacgcgtgtcagtgagtacagttccagttggattctgatatgttggatttagaaaaaccatacgaatttgatgcttatgatataaatcctctatatccttaggatttattccattaggaccaacaggtaggccaaatatacgtagcccagctgattgaaaaagtggaagcgaataacagtaagaaggagattcgatagcaacagcgtcaccagggcttagtaaacactgagtgataagatacaaagcctgttgagcacctgatgtgataagaatagaagaactagtggtcttgatattgtaattagtcttaacataagcagataatgtctcacgtagacctaagtgcccttgtggatgctcataacttaaatcatttggaaaggattcatcaactagagaagattgcagtaattgagagggaaataaatcagatgataattcaccacttgctaaatcaaatccattttctagctgttttgctgcttcacggatacgtttaattaaggggtatgtaggtaaaaatgtacttccttctacatatcttctccagtttgtagatcctttagataaaactccccatttatgggtgctgacacgtgtaccactcccacgttttctttccactaaaccaactgcatgcaatttatcatagacatgtacaatggtcatgcggttaacatttaatcgttcagctaatttacgttccgacggtaacaaggttcctagtggaaattcaccataagaaatcttttgttcaatgaaatcaaagacttgttggtacaaaggcttatttgactgacgatctactttccactccatttttattcacctcatgttaataattaattcagattatattttttaaaattggattagtcaatatatatccaattggatgcatacaaagaacctctttttatttatcatcatatttaagatttatattaaatggatttattagaaagaggaggatttatcatgactacacaacaacataatgtgcgagtagctgttattcaagctgcttcagttattatggatcgagaagcaagtacagaaaaagctatttcattaactctagaagcaggagaaaaaggcgctaatatcgtggtatttccagaagcttttatctcagcttatccaaggggactagcatttggagctacagttggaagtcgttctgcagaaggaagaaaagattggctgcgctattgggaaaattcggttccagttcctagcgaaactacggacaaattaggagaggcagcacgtaaagctggtgtttatctcgtcattggtgtaattgaaagagataacgaatttagtggtgggactctctattgttcagtattattttttgggccagatggaacattacttggcaaacatcgtaaattaaaaccgacaggttcagaaagattaatctggggagagggagatggaagtacacttcctgtttttgatacaccacatggcaagataggagcactaatttgttgggagaattacatgccactagcaagggcagcgatgtatgcaaaaggagttcaaatttatattgcgcctacagctgattctcgagatgtatggcaatcaacaattcgtcacattgcagtagaaggaagatgttttgttttatcttgtaatcaatatgtaaataaagatatgtatcctactgatttagcatgctatgatgatttggcttcttctcctgatgagatgtgtccaggaggaagtgctatcatcggtcctttaggcgagtatatcaaggaaccagttttcgggaaagagaaattgttaattacagatcttgatttacgtgagattgcctacagtcagtttgattttgatgtagtaggacactactcaagacctgacgtatttcaacttgtggtaaacgaggagaagaaagaaaatgtaaagtggaaaaactaaaaatattttaaaatgccactatccaagcattttttattaaatcaaagaacagattgggcgggtattggaaatacattttcagttattatcttattaattttcttctggaagcgtgtttcaggtgttggtgttatcgcaacgattattatagggtttgttagtgcaattggttggtcactttcaccacttgaagctatggtatctgcaaaagctgcaacattctttatttgcttaattgttggtattgtattctctctaaatttatcctgatactgaaaaagaagtacagattaattctaaattagtaaaataacaaaaatagggatgtaagaatggtgttaagtcaacgttcttacatctcttatttttatttctttagaattaatatttatctttcagacagcttttctcactaacaataaggtaggggctagtcaaaacaaagttgaatttatatatcagttgtttcgaactgaataaacgatgtaggttttctgtctttatcaacgatacttgaaccagagttaaaaattcaatcagtcaattttcctagaggagtttactatttttagaactctattttaagtggttggtaaaaacatctccttattggatggtccattttattccttttcttttattattttaagagaaggggatattgaaactgaacaaagaaaacgttactacgtgattgacaggctactttaatggaagggagttttcaatatggtaaatcaaatattaaaagtgccagatggcccaccaagtgatgtagaacgtataaaaaaagagagtaactatttgcggggatctctagcacaatcaatgttagaaccaatcagcgcaggaatttcagacgatgacaatcgtttgatgaaatttcatggaagctatctacaggatgacagggatttacgtaatgagcgtcaaaaacagaaacttgaaccagcgtatcagtttatggttcgtatccgaagaccaggcggcgtggcgacaccaaaacaatggttggtcttagacgaacttgcacaaaagtatggtaatggaaccctcaaattatcaacacgccaagcatttcaaatgcatgggattctaaaatggaatatgaaaaaaacgattcaagaaattgattcagttcttatggatactattgcagcctgtggtgatgtaaatagaaatgtaatgtgtgatccaaatccttatcaatctgaaattcatgctgaagtttatgaatgggctaagcaattaagtgataaactactacctcgtactagagcgtaccatgaaatttggcttgatgaggaaaaagttgctgctacaccagatttagatgaaatagaaccaatgtatggtccactttatttaccaagaaaattcaagattggtattgcagtcccaccatctaatgacattgatgttttttcacaagatattgggcttattgccatcgttgaaaacgagaaactagtaggctttaatatagctattggtggtggaatgggaatgtcgcatggtgacaccaaaacataccctcaacttgcaaaattaataggtttttgtaagccagaacaaatctatgatgtagcagagaaagtcattacaattcagcgtgactatggtaatcgttctgaacgaaaaaatgcccgattcaaatatacagtcgaccgcctcggattagaaaccgttaagaatgagttagaaaatcgtcttggctggtcattagataaggtaaggccgtataaatttgatagtaacggtgatcgttatggatggacaaaaggtatacaagaaaaatggaatttcactctgtttgttgagggtggtcgtattggggattttgaagactataaactaatgactggtttgcgggaaattgctaaggtccatactggggattttcgcttaactgctaatcaaaacctagtcattgctaatgtatcaaacaagaaagaaattaacgagttgattgaacaatatggtttaacagacggtaagtatttatcagcacttcgtcgtagttccttagcatgcgtagcactcccaacctgtggcttagcaatggccgaagccgaacgctatttaccaactcttctcgataaaatcgaggttattgttgatgaaaatggtttgcgcaatgaagaaattactattcgtatgactgggtgtccgaatggatgtgcccgtcatgcattaggggaaatagggtttatcggtaaagcaccaggcaaatacaatatgtatctcggtgctgcctttgacggtagtcgtctaagtaaaatctatcgtgaaaatattggggaagaagagattttaaacgaattacgtgtacttctttctcattacgcaaaggaacgtaatgagggagagcactttggggactttgttattcgtgcaggcattgttaaggcaactacagatggtactaattttcatatgtaaaataaagaagagacaggattggaatcctgcctcttttttacaattccaccttatttaagagggatttggtatgttcgtgaaagtactaactaatgatatatattaagtggatggcttattaaaagtaaaattggatggttatttttcttataaagtctttaatataaaaataaagggctaaataattttagagaataagaaaatataaagtaaatgttaaaggcagagaatttaaaatgagatgaggaaaacaggtggtaaaaaaattatcagctaaacgcgtagttattggagcttcgcgtaaaacagaagaaataagtatgttaattgaaaagcaaggtggaacgcctattataaggtctcttcaaggaactgtatttttagcaaaaaaggaattagaagtagaattacagcaggttataagtgcaggagtagattgggccattttcacgacaggaattggggttgagacacttttaactacaactgaagagttgggtattcaaactgagtttcttagaatgattcgtcatgctaatgtagcaacgaggggctacaaaactttatctaccctaaaaaaaatgggtattaacccagctgcaacagatgaggatggtaccactcaaagcttactacactctttagaggagttcgattttaaaggaaaaaaagtcatggtacaacttcacggtgagaaggcccctaggttaattaagtttcttgaagataagggagcacatgtatttaaagttttaccatatcaacatattgctcctaattcagaaattgtaaagaaactatgtaatgaattaatcaacaatgaaatagatgcagtttgctttaccacagctattcaagttcgatctctttttgattttgctaaagaacatgattatcaccaagaaattcagcaagcatttaaggaacaagttgtagctgttgcagttggtaaagtaacagctgaggcattaagggaagaagggattcaaagaataattgttccagaaaaggaaagaatgggtgctatgattatagaactgtctcggttttatgcaaactaattattatacagtagggatttaatggagaactaaaagtaaggatgaagtaaaaatggattggaaaccagatcgttcagataaaaaacctatttataaacaaattgctcattatatagaacatggaattgctacaggcatcttctctccagatagtacgttaccatcagagagagcacttgcgagtgaattaggagtaaatagaagtactattatatcagcgtacgaatacttacactctttaggcattgttgagcgaaaaaaaggtagtggaacacgtataagtacaaatatttgggggatttctcataaacgaattccaaattggggaagatatgtagaagatggctcatttttacctaatctcccgttagttcaaaaaattcgtacagaaacacaaaaagataatttcattaatttggcaagtggtgagttagcacctcagttatttccaactattcaatttcgtgaaattcttactcgacaaccattcatggagaatttaggatatgaccaccctcaggggaatgaacttttaagggaaactatttctcaacatgtaaaacagtataaaaatatagatacaaattcttcttctattcttattacttcgggtgcacaacaagcacttcaccttattgttcagtgcttattaaagcctggggatgctgtggcaattgaggatccgtcttattgcttttctcttcctatttttcaatccgcagggcttcgaacttttttattacctgtagataaggacggggtgaatcctaacgatcttatatcattgcataaaaagcatcgcattcgaatgattttcttaaatcctgattatcaaaacccaacagggacggttctttctacacctcgtcgtaaaaaaatattagaactgtcatctgaattaggtattcctattgttgaggatgatccttatacgttaaccacttttggtggggaagtgaatcaaacattgaagtcaatggactctaatggaaatgttctttatattagttctttatccaaaattgttgcctcagggctaagaattggttggattataggtcctcagtcagtgattcaaagactcgctgatgctaagcaacaagttgattttggacacagtgtttttccacaatgggttgcaaaccaatttttaagttcatcatatttttccgagcatattcttactattagaaaaaaccttaaacttcaaagagatgaactagctaatagtcttcatgaacttttaagtgatgaaatggaattttatatgccaaatggtgggattcatatgtggtgtaaaataaataagcccatccatgaagggcgtctgctcgaagaatcgctaaagaaaggcatagcttttgttccagggactatttttggttcccaaaagggatatgtacgcttcacttttggacgagaaaaagttgaatcaattagagaaggtattcttaggtttgcagatgctttaaaaagcgtaactaacacataaattttcttaagcatgttactttttagatgaacactggcttgaccaataatatttttatgtaaagtattaatcaagccaataaatacgccacgtagaaattatataaagataaaatgagtcatgagaaattcatgggtcattttttattcttgacattgttaattttgagaaaggatctttagaaagtggttggttaaattaactcataattggatggttctttttcttttatattctttattataaaaagaaaggccataaatgtttatttactatcgctcctcccataagtaatttactgagatttagctaaattgaaataaaggtaactataggtgatatccagtgatagcaaatcctgtttatttagcttatataactctagcgagagctttatttaatctgcgctcgaacttatgttaagtatgttccaaagtatatctttcaaaatcatgtgaattacttcacattgaaattagtttaaagataattttattcaaaaacgaagtgaattgtctcttatttatgaatttaaaatgagtaaattttctataaggagctttaaatatgcctattcatgaaactatccaagcacgtaaagtattagaacacattcagccatatttgccaggcaaacctatctgggaagtacaagaagagctaggactagaccaagtaattaaagtagcctctaatgaaaatcctttaggaccgtctcctaaagcacttgaagctattttagtaagcctaacaggaattaaccgttacccagacgcgaatgctacagatcttaagaggcaaattgctgttcgttctaatctatcaccagagcaaatcattgttacaaatggtgctgatgagttaattaccttgatttctgaaacgttcttgaacttaaatgatgaaattattgttccttctccttcttttagtgagtatgacttcggtgcctacttaatgggagctaaggtcgtgggtgtcccttttggggaagactaccaatataatgtggaagccatcctttcagctgtgacacaacgaacaaaaattgtttacctttgttctccaaataatccaacaggtacttatctatcaaaaaagcatttacacaaattattagattctttaccaaagcacgtactagttgtatttgatggagcatatagtcactacgcgacagctgatgattacacagttggaattgaatatgttaaattaggctatccaattattgtattacaaactttttctaagatatatggtcttgcaggcgttcggattggttttggacttgcgtcagaagctattgtccaaaatattctaaaagtaaaagaaccattcaacgttaatactttagctcaagtagctgctacagcagctataaatgacgataagcatgttgaagcctctcaagaagccaacacactaggacgcttacaattgtatgaaggcttttctaaacttggattatcttatacagagagtatgagtaatttcgtacttgttagggttggaccaaaagcaaaagacgtttatgaagaacttctttctaaaggaattatcgttcggtacggagacacatggggactggaggaatatatcagaatttcagtaggtaacccaaaagaaaatgatactttacttaaagctatggcttctgttttacaagagacgtgttaacaataattttatttgtaaaggggaagttttcatgcacgatattgctaaaaacctaaacaacgtaataaaaaatgaaaatccttttatttatgacatgctgtcagacttaggtaaaaacttatataaccagaaaggtattttgagtcaaagtgctgaagcaagcaagcgagcttatagatttaatgccacgattgggattgcaactgaagaacatgaacctatgcattttcaacatatacaagatcattttataggatatgctcctgaagatatctatccatatgctcccccagctggaaagcaagtattgagagagttatggaatgaaaaattactattggataatccatctttacatcatcaaaattttggacttccaattgtcacaaacgctttgactcatggccttagtattgcggcggatttatttgcaaatccagaggattctgtaatcgttcctgataagtattgggggaattatcaatcaatctttcatgttcgaagaggggcacacttattaacttataaattatttaacaaagatagaaaatttaatacagcctcctttagagaagctttatttaatcaaaaatcaaaaggaaaagctattgtccttttaaatttccctaacaacccgacaggttatacaccgggtgccaaggaagctgaagaaatcattgctgttctaaatgaaacagctgaagcagggattagtattgttgctattttagatgatgcctacttcggattattttatgaaaactctattaaagaatctttatttggtcaattggctggtctacatcaaaagattttgcctatcaaggtagatggagcaacaaaagaaaactatgtctggggactaagagttggtttcattacgtatgcctcccctagttctgtcattctagatgcattggagcaaaaaacagtaggtcttatacggggaactatttcaagcagttctcatttatcccaaactgttatcttacagtctctgcagtcacatgaatttgcaaaagagaaacagcagaaatttcaattgatggaacgaagagccaaaaaagtaaaagaagtattgaatcaaaaaaaatataatgattactggtcttattatccgtttaattctggttacttcatgtgtttacaacttaaaaatataaatgcagagacgcttaggatgcacttattaaatcaatatggggtaggaacggttgcaattaatcccacagatttaagagtcgctttctcttgtgtagaagaacaagaaatagaggaactatttaaccttatatataaaggcgctgaagacatagttcattcaaatcattgaatggaattcagcctaggagtgaaagaacaatgaatcaagcaactcaaactttagacgggtggtactgtttacaaaatttttataagttaaattagaaaacatagaaactgctatctagtgatgaacgtcaagtggctattgacgaatttataaaactgaaagagcaatggaatattactcaaaacaaaaaagaaggcagctatggtatatttcagattactggccataaagcagatcttatgctgatgattctccgaccaactatggaagaacttcaagatatcgaaacctcgtttaataagactaagttagctgaacacatgatacaaactacctcgtatggtatctgtagtagaactaagtaattacttaagtaaaggtgaaaacccatatgaaaaacctgaaattcgttcccggttatatcctcttttacctgacgcgaaatatatatgtttttatccaatgaataaacgccgtcaagggaacgataattggtattcactacctatagatgaacgtaatcagatgatgcgaagtcatagtatgattggacgaagttacgcaggaaaagtcaaacaaattatattaggttcgattggtttagatgattttgaatggggagtggcgttatttgctgatgatgttcttcagttcaaaaaattaatatatgaaatgcggtttgatgaagtaagtgcccgttacggtgaatttggttctttttttgtgggacaaacactgtctaaagaaaaaattacacgtctattgcacatataattaaaaacaacattagataaactaagaggtgtattaaagattgtattctcaatttcaaactccattatttacagcactactagaacatgcaaacaaaaatccaatccaattccatattccaggtcataaaaaaggaaatggaatggatcctgaattcaagggatttatcggtgaaaatgcactttctatcgatttaattaatattgctccgttggatgatttacatcagccaaggggagttattaaacaagcacaggatttggcggctgaagcgtttggtgcggatcatacattcttttctatccaaggtacgagtggtgtgattatggcaatgattatgtctgtatgtgggcctggcgataaaattattgtacctcgtaacgtacacaaatccatcatgagtggaattgtactttcaggtgctacacccatatttattcaccctcaggtagatcctgaccttggtatttcacatggggtcccgcctgaatctatcgaagaagcattaaaacaacatccagatgccaaagctgtacttgttattaatcctacgtactttggaattgcgggggatttgagaaaaattgtagaaattactcattcctataatattcctgtacttgtggacgaagcgcatggtgtgcatattcattttcatgatgaattgcctctttctgcaatgcaagcaggagctgatatggcagctaccagcgtgcataagctaggagggtcaatgacacaaagttctatactaaatgtacaggggacacttgtttcgccagaacgtgtacaagctattttaagtatgttgacaacaacttctacttcttatatattacttgcttcacttgatgcagcaagaaaatccttagcaacagaaggacaagcattattagaagaaactatccgtatggctgaaaaaattcgtggtctaattaatagaattgagcacctttattgcgcaggaagtgaaattttaggtacatctgcaacctttgccatagatcaaacaaaacttgttatttcagtgaaagaattgggtgttacagggtatgctgtagagaaatggcttcgtgagaagtttaatattgaggtggaactatctgatctttataacattctttgcattatcacaccgggtgataatgaagaggatgtcttaagacttgtccatgctttaaaagaactgtcgagagagtttaagtatcaatcagatactaatataaatactgatgttctattgccagaaattccattacttgctttaacacctagggatgctttctatgcagaaacagaagtggttcccttcgaagaatcaattggaagaattattgctgaatttgtgatggtttatccaccaggtataccgatttttatccctggtgaaatcattacagaagagaatgtactatatactaaaaaaaatatagaagctggtcttcctgtacaaggtgctgaagaccttaacttgaagttcatacgtgttttaaaagagcatagggatcttaaataatattaacgttaacctttttagattctatagagtttacaacactaaatgagaaacttaccagaaaataagtcatgtaataacatttagaatgtaattaatggagatgaatgaagatgacatggattgtagtactttcaataattgttgcaagtgctctaaaattattaataacaactatgccaaccccagtagttaagtggtttctccggaagtttgaactacactctaaacttgactcctcccatgtgagtattaaaaaggacgggaaaatattagagggtgaagagaaagagaaatttattgctaatttcaatgaagcaacttttctagagaaatattatgtgcattcaggtaacgaacaatactttttacatcctgaaaacgctaaatccccttatgttattgatgcgaaaagagggaaaaacaatgttaaattgtctgtctatagttataaagaccgtgtagacgtagttaagcaatataaaaagaaaatagaagcgtatagcttgctttctgatcctcttcagcaagaatccgtgtcttaacttaaaaagatcgcctttgatttagttaggcatcaatctaattcttattctatttgcaacaacctcacaactagcagaaaaaactacccctccccttgaactgcacctccaattattagtttttgtctaacaattggggtgcagttcaggagcagtaggtttttctatttgttgactatagttgactatatatgatatacactcttagttaacataatgtacattctaaatacatacataaatcacttagatatgatatcgtaagtataaggaaccattaactaatgtaaaggagttagaacatgaatactagtagaactaaatggcttcctgtgccttattttcaactcaatcaggaaggtacaattctaaatgtttcacacataacccattcatattttccacctacatcgaatatatggacgatcatttataaagaagaccgaaataaagccatagtaatgttttcacagagtcctaattctcatcctataacaaaacagctcattttacagacaagtaacaagttatttgggaattttaaatgtacgatccaatggaaagatggtataggtcacctcgtatgtacagaagtgaaaagtagtaaagttcttgcacctttatctattcaaaactctttagtcaacactcaaaaacggttagaggaatcagaaaaacatttaaccaaagttgctaaaatcactaattattttgtttttgcctcacagaattttttgaatttcaaagatgtatttcatataaatctttagttgtaatcatgttgatttctatgataagggtatagtattatgctggattgaattttcaagaaacattcttttttaagtttgtttcttttttttttgataattatagaacgaatcataaaaagtaaattgagcaaactactaaagtcaacgtaatctgttctttataagaatagatcacaaaaagccactgaccccatgtgtcagtggctttttgtgattttaagctgtatatgattcaaatctttaattaacataattgacgttgtaccaaatcacatgctaaaaaccttttttgttaagaaaagattcatatccattaataaattagtaaatattatccatgaggtgatcatatggataagaataagttaaaactcacatcttccgaaatagggacgctatggggagagtatgtaaacggaacaatgacagatgtagtaaatcgatatatgttctctattattgaggatgagtcaataaaggctgtttttgaagatgctatcaagacttccggaaaacaaaagaaacaaattatagcttttatagaaaacgaagggtttccagtaccaattggatttactgagtctgacctcaataaaggtaccaagagattgttcacggacatattctgcttgaattatttacatatcatgacgttacatggcttgctaggacatacaacctcattaggtgtttctgtcagagaagacttacgccacttctacgattcatgtgataatgatgctaaaaggatgtatcatcaaacgattgaattattacttgaaaaaggggagtttcagagggacccttatttttatcctgctacgaaccctgaatatatttctagccaggattttacggatgggtttttcgggaaaggcagacggttaacggcattagaaatcataagtatttctttcaaccttaaaaaaagcattatggctaaaactctttctattggatttagccaggtctctcaatcaaaagaagtaagaaaatttttagaggattcggagaaaacagctgatgatcaaatacaagccttttcaaaaataatgcacgcagataatttaccagttcctaaatcgtgggagacagaagtaacaacttcaacagacgctcctttttctgataaattaatgatgtatcatattggtttcttattccaagctgcacaagcgtatcatggaacagggttagcatcagccatgcgaacagatcttgtagctgcttacgaaagtgttattctaaagaatttaatggtaacaaaaaaatggtttgatattatggtgaaaaataaatggttagaacagccaccacttgctcctaacagaaaagaaataacaaaagaaaaataataaaatctaatattttgagcaaactactcaagatgctctgcaacgtcaactgactattgaccattcaagaaacagaaaaaactactgatccctgttcagtagttttttcgatttttaagctgtatacgatatgcattgctagttaacataatgtctcttccggtacacatcaaaaaagagaacccttatgggagtaagggttcgaacagagtcacttttatagaatatgcatctttttatacatcgttgatacaactgatatctccttacaggaagttgaagagatcatgcataaaaaaagcaccttttatgcatatgttagacacatcaaaaatagtatttatattgaaaaacatgttataattctgctatcgttcgtacttggatacgtatgaatgaacccttacatgannnnnnnnnnnnnnnnnnnnnnnnnnnnnnnnnnnnnnnnnnnnnnnnnnnnnnnnnnnnnnnnnnnnnnnnnnnnnnnnnnnnnnnnnnnnnnnnnnnnctcctgatgcctttgagcttatctccgaaactttcatgcaattctctgtattagttttttcaagcagaatacggcatacgatctttctgcctgtctcgtgggtcggatatgtgtataatagacagggatacgtatgaatgaacccttacatgaagcaacctcgcctgccaatgctgaggttgctttttattttgttattgttaattaaaatcttttatataccacgtatccatagcagaatgttcaaaacctgatagtggtttaggtaaaagtgtaaatacaaatttttcattgtgttaactaagtttgtatatgatattcagaggaaaagagcaggcttaagcctgctcttataacctttaaggctatttttaatttaaacattttctagtatttttttcaccaaagtgtctacgtcattatcttgaagtgtggttagttgtacacgacaaaatggggtcactctacactctagacatcgtctgaagcaatccacaacacaaacctctatatcttgctgataattttgttgaagaatatctaagactatatttgctttagttactttaatgttcctttcacaaaatttagctaccctcatattcagtctcccattcgcaaaaagcaccccaaaaggtgcttttttattttaaacatagtgagtgaattgtatatctaatgtacgaaggtacgtttgaaggcctgcgtcttgaattgggataataaatgcaggctcttcagattcgttgtggtgagaatgccacaatcctggaggagtaacaaatgcttttcctgttacccaatcaatgcgaacgggatcaattatctttttagtaacgggatcaatcttatctccgactaaagtataagtaccgggtgcagcataagcaacaaaatcaagggcaactgacttatgactatgagctgcttggttagatcctacaggaacaattccgaacatcgcccataatacgtgtgtaatggttagagtttgtttgaattctagattgtttaataaaatagaaatacgattttttaggtgagcatcaggagcgtttgctacttcctccaatttcgcagtagcttgttcagctgtaaaaagtgtcggtttaaaacgagtttctgttgctttaactcctaaataattaagaagtggagtatcgagaatataatagatggttgcatcttctgttgcagtgtgcctgctagtcgagccggatggaagagttaaaaaatcaccttttttccaagtgattatctcaccatttaattctgtgtggcctacaccagaaataatataatataattcactggttgcattgggttgtgtagtaatgctgtcattcgcattaattcgaatgaagtgagcaagaagtgatggacttgttgccggatattcagttttgagttcatttgaaaggtccaacgtaacaatacgagtttctcctgagttatataattcagaggaaaattctttagggggaattgcacttatgataccacttccgattggatcagcagcagtagtatattcataaaaaagggcatctttagtgcagtctttattcacttttccattagataagtttgcttgtttttcatttatagtcatgtataaacctcctattatctttatggtcttatcttatcttgataaaagacaatagtgaaatatataatataaactgctgtaatatattttatatataactgattaggaggggaaaaatgatggagcttcgacaattacaatattttattgctgtagcagaagaattaaactttagtcgtgcagcagagcgtgtcaagattacgcaacctcctttaagtttacaaattcagaatttagaaaaagaattagatattgttcttttttatcgaaataaacgtcaagttaaattaacagatgcaggaaaattattttatacggaagtttgtaagatttttaatcatcttgaacgtgctgttgaagatgcgaaacgtactcaacatggagaaatcgggacaattagagttgggttcgtaggatcggctacttacgatattcttccctcaatcctaagagaatttcgaaatttgtattcagaagttgaagttcatctattcgaaatgtctacgcctatgcaattagaagctttacgtgaaggggaaattgatataggagtattaagaccacctgtaaatgatgagatagtacataccgaaatcgtttctacagtcccatgcgtactggcagttccaaaacagcatccgttattaaaaataaaaaacgtctctctttctgatcttaaaacctatccttttgtaatgttgtctagaaaaacatggtcaaatctctatgatgaaatcttaggattatgtaatccaatcatccaacaagaggctttagaattccaaactgtaatcggtctagttgcagctaaattgggtattgccgtagttccacaatccgccgtgaatttacatacccaagatgttgtatatttggaccttgacgatcaattacctgtagcttctatgggtattgcttggcgacaaaaagatcaatcacctttagtgcaatcttttatccagttagcaagagagacttgtttattttaattagataaagtacaaaatagtatatgtccatgggaaactataattaaaagtaaaaaagttttaatagctgattttattgcgaaagtaatagggttttaaaaggtgtatcttaagatacaccttttatattatgtaagaagtataagaataaatctgagtttggatatataagtaaatgtaatttgattttatctatttacgtaatatttaacgcattaaatatctatatagttttaaatattagttatattgtagaaaagacggctatttgatgtctctaaatgtaagaggtaaaccttaaattacaaaaagtaaacttgttcaattacttataagaatgaagaatgttcaaaaaagtatacctttacggacatgatgttttaaaaatgaaactaccaattttaacgttcgtttacattttaaatcaaattacgaacgttcacttaatcgcatatacttatacgaactgttttactccactaaaaaattaaaagccttttcatgagtagttgtattagtaatttcctcatactacctcttattttatcttcaaactttcaaataatacgtctaggaggtgtttttatgccagaatacggttcaacacaaaataataaccatagcaatagttatgatactaatggtggaaatatccaaccagtagatgtaccaaaatcaaatagtaaaaagattcctgctaataatgatggtctaagtggaaaagtaaatgcaaacctcggctaccatccagaaaaatagcatgaaaaaaccaccctacagaagtaaggtggttctccgaaaagttttatcttacaaaactaaaaccatgtagaatcttttttattttgtaaattataccatttaatgagaaagagagcaaccctaaagctactctctctccaacaaaaaaaacacaaaatttgtgtgtggtgatgcttagggtaccatctttgtatatttgttggaagaccttctatctatatcatgccatcatatagaaggttattcacctgaactaccctcggaaggtataacaacattcttatcaaataaatcgtattttaaaccacttacataaataacctcttatgatttttttatcgatattgattatgattacattaggtctcttcgctatcggaccagtctttcattcattagaaaacgtaattctaacaagcacaaaagcaattttagatttaccgtttggtttagctggtattattattggtggcctacaacaagttgttgtaattactggcgttcatcatatatttaatttacttgaaattcaattattagctgatacaaaatttaatccattcaatccattaattactagcgcaatcgtagctcaaggggctgcaacgctagcagttggattgaaatctaaaaataaaaaagtgaaagcattagcattcccatcagcattttcagcctttttaggaatgacagaaccggctatattgggagtgaacctaaggttctttaaaccctttataatgggccttataggaggagcagtagggggattcttagcctcgatttttcatctaaaagcaataggaatgtctgttacagctattccaggattattattgtacttgaataatcagatttttatctatatttttgttaatttgattgcctttgctgtatcatttattctgacatggctgtttggttataacgacaagatgcttaagaatcggtaattatatataaattataaattgtaattaataaactacaatgaatgacattagaaaaagccttatatctagatccagtataaggcctttttagcaaagcttaatcattgatgttgtaggaaaagagaagattaaagcccttctcttttttatataattttatttacttatttttaaaatctgaaatatacaatccttcacgctaccactattgctcattatgttctactttagacggtatatgttaactttctcgcatggtatataattacattttcatcatacaaatgaccttctaccggaaaggagtaaaaggttttttgttatcaattatcattaacatctatactaattgctaaattaactacattatttaaagtagttttatttttactgtctaacttattgcgcaaacgaaataatatgtagctttgttgatttttcaatctccatcattatttcagccttattaatcagggttacatgttatttttccatacctcaatgcatcgtaaatagcacgtccatcgcttgaatttgtttctgtatatttgatcggcagtagcgagaagacaatataataaacagaaaaatagacaaactggtaagaaaagagacttgctgaaaggatatcatccataactaaaccatttataaggaaaatagaagctaaattagcaatggcacctccagcatagacacaagcatgggtaaatcggttgtcgtattttagtttttcatatacacaaaaagaatccaaaaagtaaacagattttattttaattttcttccatttaaaaatcgtttttccttttccaatggtaaaatccactctccctccgaaaaagatcgccatgatagaatgacctaattgatgaacaagagacacaagtggtagtacaagtaagaaagaaaacaagaacttaggcatatcactgaatccaaacacacttccatctcctttaccatgaaatgatttaataaatcgttggcttattaaaatagataaaatctatttaataatggacagacttttctcaacagaggttgtgcctttttaatcatatgtacaatcatccgtttggcaccatgaaaggcctttagtcggaggctaggaccaaccgttttttaataaagcagtaggtaaagtgatcaataatcttcaacagggcctattaagaagaatagcttcactttattttcaaacattctccataacaataaacgaccctatgtatcgtaaacaaagttactaaggtcgcttatgttatattctgatttattattcttttctctttttctttataataaaatatttggtttgtcattaagtttctaacagaatttcgttatcatgattaatttgatcgaacaaataagtaagataagattctaattcaaattgatcgtcttcaacaaaatcatctaacacaggcttactttcttctcccatttttaatcactccaacttaatttttttcgatttattttgcatgatgcccgtgattgtttttttgtcccatctttcttagaacaaagcttacaattaacaccagaatgattgctccaataatggctggaatgatggcaaaaccaccaatgactggtccccaacttcccaagatcagaccacctaaccaagaaccaataaaaccagcaataatattaccaataatgcctcccggaacgtcacgccctgtaattaaaccggcaagccaaccgataattccacctacaattagcatccatagaatactcatacatcattctctccttttgaaatagttagttgactttaccccaggttaaaacctattaatcctgttatttttttccacaacaaagttttcttcttatgtactaagatcatatagctttgcttgcaatctttttttgttcttttggacaccttctaatgtctcgtccattttatgaaaaatataagtgactagactaaccccagcgtataaattgctatcttataaacaatgacattaatataggtttttttcatactatattttgggggtgagtaaatggcaagagtaagttaccgaagtgcagacattaacttaatggcaaggatgatgcgagcagaagctgaaggtgaaggaagactagggatgttatatgtcggaaatgtaattgttaatcgtcttgcagcaaattgtatagactttaaaaatttaagaaccgtttcacaagtcatttatcaagtacagggggggaacttttcgtttgaagctgttcaaaaaggcaatgtattttatcaaagagcgagaggtgttgaaaaaagattagcaaagcaaaatttggattattggagacaacacccagcgaaatttgctctttggtattttaatccacatgctccgtgccctccaacatggtacggtcaacctgcatctggtcaatttaaaaatcattgttattacgaaccaaaacctgatacatgtgctagtgtttatagaggttagattatcaaggagctatgattaattctggagtagtatgggggagctggaaatacaacattttagtcgtaggtgctgatagctagccctatttattctatgcaactcttataaatcatgtgacaatagtccgttttaaaaaaattttcccctcactgtagcctatttctttaatctttgttttgatgtatttttatctagcgaaataaaaagggcacttcctggttagtaggtgttcctttgtttcgcataagcagttaatcaaatggaacaagaaatagtactaatagtaataaacatattaaataatgtaactacgcgatgatatacttaatgaatttcagtaatgcccgatagacgaatagagaatatattgtgtttttcatcctctagagaaagagtttgatcatgaagattaagatcatttacacgtcccttacatgtttgtaataaaccgttttgataatagttaatcgtaatgacacctttctttctcaatgctttcaatatcatgctccgttctcctttcttcctatataactaatgtagaaatgtgttattcaaataaataattatcatgcagaatttgcgagaaaatcatacaagttaaaagttatattgttttatattatttagtatacaacaaacttataggaaacgcttacattttattgtgtaaactttgtgaactttcaacaggaagaaagctcaaagaataaaagaggaaaagaaatatatgtctagaatctatatctatgtttcaatccatctattgtaccttcttgtaaatgagcttttatttaatgcttaaaatatcatttcgatttttagcacaaattctttttaattgtttaacaggtgggaattccctgtgcttaattcgttttaacttccatactttatgtatgtagcatacccttgtcaatttacctcattgctttaactcgtaagagcattagttttggaatccttctaatggatacgcaaattaataattgtacttggaaacggagcgatacgatgaataagacgtatgatgtcatcattaccggtgctagagttgccggctctacccttgctatttatcttggaaaggcaggtttccatgtgttgttagtagaccaagcgacctttccaaaggatacattatcaacccatacttttttcaataatactgtcgctcttcttcgagaaatcggtgtcatggacaaattattgaaaacaaacgccccaccggtacaggatattaaatttcaatttgaggataccgcgatagaaggacgcatccctaaggttgacggagaagaaagttgttactgcattagaagaacttatctcgatcagatcctacttgaacaagccaaatcacaaatgaatgtaaccgttctagaaaggtttcgtgtgacggatgttattcatgatgacgatacagtagtaggggtggaaggtatagatggcaataacgagaaacaagaatttttagctcgcatggtagtcggggcagacggccgatcctcaattatccgcaggctggtaaaaagtgaaatcaaaataagcatttcggcaaaagtcggcatctatttcgggtacttctctgaatttcgccatgacaatgtccctaaatttgaagtatacaagataaaagataacacagccattctctttccaacaaatgataatttatatgttattgccggcattttcccattagaaaacaaggaattgataggacgattgaaattaaatccagaaagctgtctacgcaattttttaacagataactttccgaatacaacaatagggacgcgtttaaaaaatgcagaactagtagaaccggttaaaggcattctcggatatgataattactggtataaagggatgggaaaagggtgggcgttagttggagatgcagtttgttttaaagatcctggcatggcacaaggtatccatgatgctatatgtggagcacgtatattatccaatattctctcaaaatataaggggcaatctgaacaatcaaatcaaatatctgaagaatatcaaaaggcaatagaagacgagtttatggttcggtttcacatgggatgtcaaatttcgcagaatgaacgcatctctgaacaacagaatgctgtcaataagctaatcagttctcatccagtggctatagagaaatttttagggatttataattactcaaacgagcccgatgctttagaaaaagaactcacacgaattatgcagtcaatctagcaaaaattttgaaattgacctaagagttttcaagaattagcaatgaggggaaggtaaaccgagagcagaaagggatatattgaaaacaaagataatattctgttacgattagcacattttatctaaaacatactcaatataaaaagccacttgtatgcaacaagtggctctttgttacgttgaatacattaaattattcccatcactattagagaagtttatgaatctgcaaaggatggtgttagctaataatagtcagatagaaatggaagagaaataacggcaagaaatagcaagagcaaatgtgtatgtgtgtgatttataggatggcatatacacacataacaataaagatagccaatacataaagttccaccatgtaaatatagcattttctcattatttcatataataagtaactagctcgtagcaacgttctctagtcatttcgtgtaaaatacgggcttcttcagcataagctaaagttccgcctccagcttctttcaactctttttgagaagcagcatctctatctttaatccattgacgttgtttaatttttagatcattcatctctgatgcagataattgtttttttaattcgccatagatgtcgttcaacacttggtcccacatttgataatttgctccagaagcttgtcttctgtcaccatcgatttggtcattaactggttgtacttcactagttctagtctgttctaataaatctaaataataagcttttttgctattagttatggttgtagctggactatttgttgatggagtgcttgaagttggaccagtctttgatacagtagtaatcggtccattcttagctatatcagttaagtataattggttattgataagcacggctgtgtacatccaattatatttatttgttttttgagatccatctggttgtataacagatacagtctctacagtttgtatgttataaagaggcccatcagaagagttacctgcttttgtaaaatttactacagaataatctacccagttctctttaatacccttcttatataagttgcttactaatgattgttggtcactatataacgaaccttttaaaacctgtgcaacgttactgaactggcctgtattaattgcagttgttagtccatttatgtaatcagccattactagagctgctgtatctttagtaacaaaagcgtcatcggagactgtatttgaattagttgggttttgctgattactatttttgtgaacagcactcccatgatcactaccttttatagttgaaggttccccagtattattgtctgtagcattattactatcttgattcgctttattagcactattatcactggtctcctggctactaacctctccagtttcccttgattttgaatcgactttttcttcttgttgacagccagaaaccagtaaagaaattgccgtaattaataaaaaaacaccttttttatacatagctgttccccctctaaaagttgttaatttcatgtgtattttaccaatattaaaagatagtataacaacgttttattccttagtaatgatattatttagcagtgaaatattataattttttcaaaacagtttattaataattaattcgtaaaaaacagtctcaaagtaagagactgacatcttattcattatgctagagcaagaatactttatttagcacattattataacgacatcatctgccgcccaatactatctccttgaccaacatcaatgtaatgaactttcatggttttaggcgttgcagcgtatgaggaagctggagctgcaacaattcctattcctatagcgagtgaagaaacaattttgataacacgacttttcattgttttatccccttttgataaatgtatttttatttgcattgttcatttatagcaaaattaattttactacacgaaatcataagttaatatnnnnnnnnnnnnnnnnnnnnnnnnnnnnnnnnnnnnnnnnnnnnnnnnnnnnnnnnnnnnnnnnnnnnnnnnnnnnnnnnnnnnnnnnnnnnnnnnnnnnggacatctcgctatttctttcctacttcatgaaaaagataagccaataggccaacctccagcatataaaaaagagtacatactctataatcatctactcatcacctactatgagattatttagtcttactttgtgattttatgtaagtttaaaggaagttttgtagaaagtatttcattaattaaaaaaggataccataatatacctaatgttagtttttatagagaattattacagtggataatgaatacagtcttttgtattttagaatcagatcactggagaaaagaatgtaagagttttgaaaaggaactgcttaaaagtggaattcatgaggatattttttattatgaattgatgcgataaacgttgactctaaagtaaatagataggacatatacacacatgactaatcgaatttacttatttactacattagttttacttggttttcattttcttgtaactgacgagttttataatgaattagatagttcgacaatcatacaaaaggctattctaaaattaggcggtgaagtaatgagtaaacaaatctgctccgatatacaacgtaaaaaaaacttaattatagactctttaattcatttaggaatctataaaaaaggcaacaaacagctttatgaattaaccttacatgagttggaaacagagtatcaaatagttaatccggcaatccaagatctatctttttagatttttgctaattgaaactcacttgttaaaaggagggttaatctatgtttttaaaaaaactcatcaaaaatggtttagttacggttcattattatgaaaatgagtcactacaaacgtgtaaaggtcgtgtttataatcttaatctccatgaacagacactgtctttaagagatgaaaaacaaaatatttttttaattcgcttatctggtgttgaagatatttattgatttcttttgtttgattttagtttagtaaagagttttctctattttttaaggtcactttgtacatgtaaaaggttactagctaggaaaccgtaaagataaagaaatgaaataaaaaaggaagaggaatgatggaggaaaacaaataaatatggtctgattttattcagaaggaccgatttgaactgcattcgtaccttacttatttaatcaatgtcatgatgatagtccaaggcagttagaagatgaaaatacagaagaataaatctattgataaagcaaactgaaaggataaaaaatgaatatgaaaataatgtaggcgacctcacgattctaatccaaatgaataggtcgtctattgctgttataaaccttttttaatatatagtagatacatcaattatatttatgatcttatacaagtaaccttatgtagaattcattttttacccgtataaagcttagaagggacgagagcttgtgaatacaactgttaacgagttgtatgattttggaatagttttaagaggaaagctattaaatagtaatctttatgcttattatttaattgatgcaatgagaagagaaaatcattttgattttttatattattttttgacagcaactgtagatagtcaaacacctatacctgaacgtgtctccaatgtttttttagaaatccttagcgataaagaaaaattgagtgaccttactccatttgtcatgggtctggttgaaaaataaatagaaataaagatatatatgcgtttcctcagatatctaaatccctttattaaatgcagtcaatgtttttgggtattagtattggctttggtacggaataagtcagcttgttaattaaatattatttttgcgcggcatggattatatatttttgtttatagtttaataaaatacccaaatcatatgaattaaaactccaactaaaattcctttcaagctacctgcaatagttgtgatgcgaactggaaataaagaggttgtacaatataactatataaatgaacaaactaaaggaggctacctatcttgaaagcaacaagcattaaattttatgaattcggagaacctcaacaagttctaaaaatagaaaataaacaagtgaaagatcctggagttggtgaagtgctagtacgaatgaagactcgaccaatcaatccatctgatttaattcctattaaaggggcctattcaaatcgaatttctttgcctgccattccaggatatgaaggagttggtatcgtagaagaggtaggtccatctgtttctaaatggtttcttggcaaacgtgtattaccattacgaggtgaaggtacatggcaggagtttgtaaaaacgtcagctgaactagcgattatagttccagattatctagaagattacatagcagcacagctttatatcaatcctattacagcatgggtgatttgtacggaaatattagcgttaaaaccaggagataacctaatagtaaatgcctgcggttcttctattggtcgtatctttgctcaattatcccgtattttagggtttcgtttgattgcagtaacacggaataatatctacacagaggaattaactcaacttggcgcttcatatgtaattaatacagagatgactccactctacgatacggttatggaattgacgaatggtcgtggagctaaagcagcaattgactctattggtggatcagctggtacaaacttatcctactgtgtcagtctaaatggagtatttttgactataggtcttttatcaggaatacctgtcaattggacagaaattatgaataacaataaaataaatacaaatatatttcatttacgtcattggaatcaaaaagtctctacacgaaaatggcacgaaacattttatcagcttatacaatttgttcatgagaaacagttaatattaacaaaacctcaagttcaataccatctttcagatgtaaaaaaagctcttactactaaaattaagggcaaaatacttttaactagttaaaagtcaggaatattctttataaaatataaactaataacatgaaggtagtccctttaaacagctaaagaatgtttatatctttgactgttcagtaggttttttatttattttttgaatggacaggcaaaggcaattcggttttcaactttagaagcaatttgcaaagccttagaatgccaacccggtgatactttagaatgctggagtgataaaggtaaatagcaacttatttcccatcataaaagagctctctaatcttcatatattagagagctctttttatatttaaattcttagtataaattgatgtgaatcttcacattctataaatgtttaattaaattagaaaaggagatcatgaatatggcaaacaatcaaaagaataatcgtacaaataatttagtggtccctagtttcgcacaagcagttaatcaaatgaaacaagaaattgcacaagaatttggagtacagctgggacctgatacaacggctcgtgctaatggctccgttggtggagaaattacaaaacgtcttgtagcattagctgaacaacaacttggtggacacaagaaatagtactaataaggtaaataaatcataaaaaagaggaagagagttctcttcctcttttttatagcgttatcattaacattccctgtaataagcatattaaataatgtaactacgcgatgatagacttaatgaatttcagtaatgcccgataaacgaatagagaatatattgtgttgttcatcctctagagaaagagttagttctttcccccagttaacttttttattattcaaatctcttattagtttacctctctattcaataaattatatccttttcaacaatatataacaaaaaagtccttacttacaaacaaaattattgacgatcccactcgtaacccttatgaatttctaagccatatacatagtgacataattattttaaagataagtacgctctatagtaaacttcaaaccctttcggattgccaagaggatctaacaggaattgaaggaatgtataggatacagtaagatgtacactttaatcctactgacattattgatttaaactagacaaaactaatatttatcagaaaaacattattgtgataaaaatagtcggtgacaagacatttgtttatgagtagtgttatactagtaagcagtctactaatatcccctgaaataagtccatcagagcagcatgtccacgagacaaaaaacagacaaataaacgacatttcaaaaaagatgaagagtattaattaaattataagaaaaagaatgctcttgggaggcgccttagtttattggcagatcgagagttattcaatgctcaattgttttaaatacggaatatgagctaagtaaagtgtaaataatttaattaaggtattttattaacgcaatctttaagggttagttactattgcttcataaaaaagtacaatgtctaaattggttttgcatattctaatgttctccaatcgaagtaataccctctgcgaatgaatcaaagatgggagtttttaatttaacatgaaaaatgtttcaatagttttttatatttcggtagtcatactggctcttcttgttcttgtgggagttacaatgcctgcaacacttgaaaatgtaacaagtagcctgcaagatgctattacaaatacgtttggctggtactatttaattgttgtaacgttgtttgttatcgtttgtttgtacttattggttagtccgattggtcggattaagcttgggaaagaggaggacacgcctgagttttcacgcccaacctggcttgctatgctctttagtgcaggaatggggattggcttagtgttctatggtacagctgaaccaattagtcactatgcgattagctctccaacgggggaaacagggacagatcaagcaatgaaagatgcaatgagatatactttcttccattggggcatccatgcatgggcgatttatggaattattgctctctcattggcttactttacctttagaaaaggagagcgtagcttaattagcgctacattaaaaccaattatcggaaaacaggcagatggctttataggaaagataatcgatattattgccgtaattgcaactgttatcggtgttgctacgacccttggattcggtgctgttcaaattaacggaggattatcttatttatttaacgttccttccaatctcacgagtcaattccttattgtgttagttgttacgatcttatttatagtttcagcattaacaggtttaggtaaggggattaaaattcttagtaatactaatatgatccttgcattggcactttttctattaacgtttatattgggtccaactctatttacgttaaatttgtttacagatacaattggtgcttatctgcagaacttaattaatatgagttttcgtatagctccacttaatgaagaacatcgtaactggatcaatggttggaccatcttttattgggcatggtggattgcgtggtctccattcgtaggaatctttatcgctcgggtatcgaaaggaagaactatccgagaatttgtcgtatgtgttttactgattccttctcttatcggtttcatctggttcgctacattcggtagtgcagggatgttacttgaacatgatgggattgcttctatttcaaaattagcaacagaagaatcactctttggtgtatttgccaactacccaatgggaacaaccttatcaatcatagctattattcttattggcactttctttatcacttcagctgactcagggacctatgttttaggaatgatgacaacgaatggttctcaaaatcctagtaatagtgtaaaggtcatctggggtgtgttacttacagctatagctcttgtccttctctattcaggaggcctacaggctttacaaaataccatgattattgcagctcttcctttttcgattgttatggttttaatgacggttagtctccttaaatctcttaacaaagaagcgaaagaatttggaattggaaagttaaaaaaacaaaataaaaaatagtaataaaaaagcacatttgtttgtctttcagttaacaaatgtgctttttgttatttcgcttatacaagtgtttattctatgtctcttattttgttagaaaggttactccgtgatctccagaggataataatggggttagataatctatcgatgggcaaagcattgcccatcagctaaaatattattgatttcaaaagacgaaacaattaaagtattattcaagataaaggctttctacaatcaaaaagtttcatagtaatcgactttaatgttaaatatatacttatttaacagcttctttaagatccttgcccggtttaaaagcaggaaattcaaaagcaggaatgcttattttttcaccagtttgtgggttacaacccgttcgagctgcacgtcctcgcacttcaaatttcccaaatccaatcaaatggattctttctcctttagcaagagtttcagaaatcgtttcaaataaggcgtttgcagcttttctagcgtctcgcttcgttaatgatgtttttatcgcaacggtattgactaattctgctttattcatccatatccacctcattctcttatttttagaatgtatagaatctaaaataatatgatttctatatatttcttacttaataacattagataaagggcctgaaaaccctgctttctataaaaatcaatgctttgcaaaaattatttatccgtaaccagcacctgaaaatgaaattagtataaaactggcacccttcaactattttaaagcatcaacgagaaggcatagatattgctcaatctaaagggaaacaccttggcctcccatcattacttttccaaaggagtgggataaagcatataaagaatgaacgtctggaaagatcactgtcgtagtatttatggatgaagtaggaatgaaaaaaagctacattttataatagggcaaaagcttacagggcaaggaagtaacgtccttttgcctttttattttgttggccatgctagcaaaataggtgatgcttgctatatgcagttattccaatataaataataggctacttgtcttttttctaaactgaacatctcgacactgaagtcattcatagaaaaacttttagaggttgtgtaagaaagtagtaattcacttaagttcacacatatagctctggtaaaaacactctaatccaaaaaagcaccctgaaaggatgcttaatagttagcctgtaaaacttcaatttttttcttgagtttttggctttcttcctctaattcaatgattctatcttggagttctttattatcccagttattttctagctcttcagataattccattcgctttttatggatttcaattcgttgtttagccatctcttctacttctttatttaattgtaattgttcatatggattcattgtattccccccctttatagtctatgatttttactttcaacatcagaaaacaaatccctttaaaataaagtccattgggggcacttcgaaccaagggctcgtttacttttcgccttgatgatttatacagcattttatatatcgttgatttattaaagtttctcttaattgtttcaatctttaaatcttatatataagttctttaaaaaacattctcactgaaagacgtaaatcgtaattataaaatacgcaataactaaagttagtatagtacctccattaattaatgtaaatctaattaaaagtttgtttcttacttcttttctataggatgcattatgataagcttgagtattgttaatatagatttgggcaagcacctttagatttttcaaaaaaacaacgagtgcaaaaacaaataataacatcactaaaagactaatccttataatatccaaatttcaatattatcctttcctaataaacacttattcaatgtttttttctctattgtttgattcaacaatatcttgtgtagtccagggtgaataactatacaccctaattcatctacttttgaaacaatatcagttgttttcattagtttactcaccctactttttatgccttagatttatcctatccatcaattgaaacatcaagcatactcaatagttcaaaactctcatgagctactgtaatgattgtcaggggaacccctgtaagcaaaatagcgttaaataacctgtttcttataagagatataaataaaaacagtgctaatactataacaatagcctgaggcaatttatttctccttatttaatctcaattaaaattttaggcccacccgcaaatttatctacttaataagaaatccaagaatctgccctattacaatcaatgatacaaatatctgactaccctttatcaatcgcatgttcacaacgctgccgttttggaatatttatcagctggaaagtagaccacttcatcataggatttgatactttcttctggtgatgtgactgctaaaatagcatggctctttctcacttttggtgaaggtgctttatagatgatatagtgaaataaaaaggagcgaatctcaacatgcctttttcttctttcactaatatagaatgcttacgagttatacaagaagatcaaatatttttacttataaaggtgtaaaaagtcgtgttatacatgagaattagtagtaaaatggaggtaaatagtaatgaaatgtactgttttaggaattttagtagattgacattttaaaatgaccttatcttttcacctctaagatacagaaacattagtttcaaacagtcattcttagctttttttatattgagaccgaaactcagaacaaagagttgtttgcctttctcaagatgatgttgatcaccttattaagttcttgcagcacttaaacaaaaagaaagtccctttattatttatctaattatattcaattaatgggttattaaaaatatcttgtacctaacaggagtaacaagtttttcaatgtgaacgtatcgaattagaacgcgtgatataggaagaagaaatctagtcgtgatatatactaataacaaacataaatatgatggagggcattatgacgaaacgattagatttacgtgtcgactttgcgtttaaatcgttatttggcacccatggaaatgaatccattttagctgcctttttaaatgcggcacttcgctttccagatgagaagaagattcaaacggttcagttattagatccgcattttaataaagaaaaccaagaagataaacgttcgattttagatgtacacgcgcaattagaggatggaagccgcgttaatattgaaattcaacttaataataagctgatatggaaaagcgaacactctattattggtccaaaatgtatagtagccaaatgaaggaaggcatggattacggagagctttgtaaaaccattacaattaatattgttaacttccgttatttgtcccacattcatgattatcactcaactttctagctttatgagcgtgaacaaaaattactcttaactgatatgctggaaattcattttatggagctacctaagttattaattaaatggcgtaatagagaggtagatcctcgaaaagatcaacttgtgcgatggttattattacttgaagcatctgaagatgaagaaatcactcaagtattggaggagattgcgatgcaagaagatcaggtattaaagaaagcaatggatgaatgggaacgtgtgagccaagatccagaagtattacttgcttatgaagcaagacgaaaagctcttttagatgaaaaatctgctttaaaaagagcagagaaactgggagaagagcgaggagaaaaaaaggggattcagaaggttgctttaggcatgattcaagaaggtatagacagtaaaatgataagtaaattgacaggtcttacaatagaagacgtggagaaacttcgttaccaataaatatcaataaaaagagctgtatcgtaagatacagctctttttattatagattaggtacttatttttcgttactcagataaaataacaaacctcttgttctagaaggaattttgtactatttcatagaaagtggccccttggtgcaactataagtacaagattaaaaaataaatcttactgttcctttaaatctttctccacctgtatgctaattttagtaaggtattcttcttcgttattagttttcatcgaatcgtacaagtactcttcatacgcgtcacctacaatagaatagccttctgtcttaataaaattagttacatggaggtaggaagactcaatatttttataaggtccttcgtgataataaatggcataaagaccttctggccttgattgtcctgtgtccaactcactataagaaaataaataatcaaccctctcaaacctctcttgaattagggtatcttttgttagtaaagatccaataggtaccggaacttgcaaacctatctgttttccaaaatgattatattgctctgaccattcttctacagtattcatgccctcatttgaggttttattgcttagaaggatgtactttttctccgttttttggacataaacttttccaaattcgacacctttcagttcctcttccgttgaaataatctgcttaaagaaacgttgaatttgaagcaatttttcaatttctttttctactataacggtttgctgatttgccatttgaataaatttatgagtgttttgggaactaagatattcttttagctcctcgattgatacacctaatttccgaagagactggagtgtagagaatgatttaatttgatcataggtataatagcgataaccatttaaaagtttccccgcaggtttgaaaagattaattttatcgtaataaaataatgtatctttcttcactcccacgtagctagcaaattctcctgtagttaaagttttagtttttctctccaagttgaaaactcctcttgactatagactaactccatacttcatactctaccataagcaaacgctatatcatatgacatggaaggtacatcaagctatataagcttttgcatagcaatctatacagacggaggtttccatatgagtaagacaaaaagaagtacactatacctcttacttataaacatatttattgtttttttaggaattggtttagtcatacctgtactaccgagtattatgaatgaattgaacattagtggtacaactgttggttatttaacagcaatatttgccctaacacaattaattatttctccatttgcggggaaagcagctgataaatttggccgtaaaatcatgatagtaataggattatttatcttcagtctatcagaattattatttggaataggggaaacaatcgagttattgttcgtatcacgtattttaggcggtgttagtggtgcttgtattatgcctgctgtgacagcttttattgcagatataacaacattagaaacacgcccaaagatgctaggatatatgtcagcagctattactactggattaattatagggccaggcgtaggtggcttcttagctgagattggcacgcgagtacccttttactcagcttcagttcttggatttgttgctgcaatcttatccgttaagctgttaaaagaacccgcgtctcctcaagaagaagtagaggtcaaaggactaatagaaaaaaagatgggcttaaagaagatattcatgcctatgttctttattgcttttgtagtcatttttgtatcgacatttgggttaacagcatttgagtcattcttcagtttatacgttgatcataaattcgcgtttagtccattggatattgctatttcaatcacaggcggtgccattataggtgcaatatttcagattgtactattcgaaccgttagtaaagtacatgggtgaaattaatatgattcgttggtcattggtagtatctgcgattttagtttttacaatgacattagtgagctcttactggacggttatgacagtcacatttaccgtatttataggtgcggatctcattcgcccagccgtaacaacgtacttatcacgcattgctggtaacgaacaaggctttgttggaggaatgaactcttttttcacttccctggccaacgtatttagccccatcttaggtggcattttatttgatattaatattaattacccctactatttcagtacagttgtcattatcattggtttagccatcactatactatggaaaaaacctaagactgaagagttaaacctatctaaaaagagtaccttgtaaactcttatatgtaaatctgatttctcatctatttcatgaaaaatgggctattaagacaactaccagcatataaaaacccattacttcttacataattagctcccccttacttactggggtaagagttctttttatttttcgattggacaggcaagcttactgcagtagctacatagtatctaaaggctatctacttcgttagcgttactgcgttaatacaagctttatgtatgattggagctaatttcgaaaggaggttattgttaatttgtttttgataatagtcttgataacaaatcatcaaagattttacgatcaaaaaatgagaaaataaaacttattaaatacattcgtttttgagattggtaacacagaaaaatgtcattcttcaacttacttaaggtggctttttatttcgagaaccgaatatttaagaaactcgcttgattattgaatatcattgcaaagccttattgaacaaaggcttcctctaccttctaataattaagcgattaaaaatttttagcttttctatactaggggtcacgtcaccaaaagtaaaaagttacacgtttagatacattttatgcggttacctgtatgttaaggaactagatattgttattttattattcttttacctttacttagtaatttaaaaatactgctattatagcagtatttttgttaatgtaaaaaatctagaaatacgcaaaaaataatattattactctcatcttcaagcaataatattattttttatttttgtctaaggacttcaatgcgtttcgatactcattatcattcatttcctgtttctctttattactgcctttagctaaattagacactgcttgacgaaacattccatctttttctcctgtatggagacttttcctttgctcgtgagtaggtggttcatgaggaatttcatttcctacttctacttcaattttctttccactttcatcaacaactgcttctttatattttttagtaagactaatgaatacaataagaattgctaatgtcaaaacaaaatagatggagagtgccaataaggctagtccaagtcctgcctccaatcttccatcataataaagtaatgcccttattccatccacaatatatcttgtaggtagaatataactgaacagtcgatggacggtaggtaatgttgatagaggaaatgctccgccactagaaaatatccccataaaattcaccgggaacattactaacattccccatccacctaaaaatactgctatcgttttaaataacaaaaacatggttgtacaactaaagaaagtaaacaggaatatcgtccaaatgtttgaagcatgtgcactcccaaaaattccaaatacccctagttgaataaaaattgaaacacagaaagttaaaatgataccaaaaattatttctgatgtaaggacttcagattcacttaatgcagatccccttttcttcaaaatgccattacttcgcaaaagatatccatgtatcatatttgcacccaacattccagtaatagatgatataagggccatgacaaacggtgtcattcctttattaagattaaccggcagcctcagtacatttttggaaacaacctgtacggggttttctaataatgaagcattctctggtgctactctcattcctttttgcagtaattcattttttagttggctactaattcctttagaagcagttaaagcgactgtctgaagggtattactcgcaatcatggatgcagtttgcccaatcccttcgttcaataaaatttctaaatcagcaggtttatcatttgtaagaccggaaataagcgtatcatggactcgatcaagactttttgaatagtctgaagggataattaatgcgccatatgccttgttatttcttatatcagtgaatgcttgtttcctacttttatcaacttcccatttaaaagagttcccattttgcttttcgataagatttaataatatggcatcgccaacttttcccttatcttcatttacaacaattagaggaacatcagacatgttttgttttgcacctttaaatataggcagatatacaaataccatgactaacattaataatgatattaaccaaattggaaaccatgaggagcttaatttaaacaattgcttcacgattcaattcccctaacaatggatattttttattcattttattatgtccagtttggtatcgattattaggttataaaaagacacctttcatagttacaggaacgtttcttttgttggagaaaattaatatttcttcagtcttttattttcaaaaagactttctgagttgtcgcatttgaaacatcgtagaagaacagaggagcataccaacgagttgtccatatatgtgtgttttcgtgtatgcatgcatcaagtagtagcttaaacgattcatttgttgattggctacagcaaacaaacaggtggaggcttgtccagacaaaagaaaatggggagagcctcgaacttaagccaagatatctttccatattgtttaaccattttacatacatttgatagtgggatgccgattcgctccattggcatttccttatcaaacactagcattcaagaagaggagcaaatgagcttatttgaggatatcgatcagcgtgaaagagcctatgcttttgctaaaacgattgatgacattcggctgcgttatggcaagaatagtgtactacgtgagtctagtcaccttcctcactcgacagatcgttatcgaaatagtcttacagattaatttcaccttaattgaagccttacatattataaaaaagggcagtacataacagagacaaggttcattcagtttgtcgattcccttagtaattgatttttttattgataacgtatttgagttaaagaataaaatgagattaagcgaattcattgatgctcgttttatgtaaggataaaataaaaacgtatttaaaataagcactaactaaaataggaaatagtcagtgcttatttagataaagtattagttatttttttctactgtatggcgttatgtttattatcgatttcataactgttttcttttatatataataactccgacaatgattaaaactactcctattactctaggaatgcttaaagagtgcacatgcactcctattaatccaaaatggtcaattaaagtagaagcaaccatttgacctgcaagaatgtaagcaactgtagcagtagctcctagacgaggtataagtacaatagaagcaactacataaaaagctcctaacaggcctccggtccatacccaccacggtgctgcgaaccattctttatttacactcataccttttccaaataaagatataataagcaaaataattgcaccaactataaaagaaatagtcgaagcaatgataggggaatgtacgacagatctcaattgagcattgacactaaattgagtaggtaaagccatgccagctaatattgcaaatataattaaaaaaattatcattatattcctcccacacctcttttatattcaacagagctgattgctactgagaattgttactatttatcctatgtttaatctgtaaataaaactttgtgtgacacggtgaaacccccattaataatattcttcataaaaaattaaattttcagacaacttaaactacaaataacttatcttttttgtattataaacagtcaaattacatatttcaatataaaaaataaacttttttgataaaatttaaaaaattatcaattttccgttcattatgcattgttaaaataaaaataatattaaaaaccaaaatctttattcaaatcgcgtacattaagtagtttaatatggttattatcttttgagaagaccataaataatattcaaaacgcgtatattattctgttaactaatgagatttaattacatgcaagaaagtttataaatatagtactacgaaacttataaagcttttgaaaatgggctaaatatctaaaagtaaaatcaattatttaatatctataaaatacataataaattttatagatactgaaaagaccttattaacatattaattaaggtctttttatcattatttcttattccgattaaagccaacgatgtatattactttcaaagcacttgatttgaccttatctttttcttttgaatccaaaactcactatataagctattgctaatgagataaaagcagcaatactagactttatgtaagaaatctctaaagcccaaaggccgtatttgtctgcatttaaacgatacatagaccaccactgtccattttcacctttaaaaaatgagaagataatccataaaagaactaaaaacaaaaaccatgaaaaaaagataatatagttagtcattttcttattcatttgctatctcctttatcttccaaatttactcgtgatattcttgtcttctattatattaacaataatcgggaaaactttagagtttttattgaataaagaacgtttgttcgtatataatagagaacaaacgttctttatttgaggagttattccaatggattatgaatatctaccaaacagggtcattatttgtattgatatgaaagcattctttgcttcggtttcatgcgtgatacgtaggctagatccattaaaaacaaggttggcagttgtaggagatacaaagcggtcgggatcagttgtgttagctgccacacccttattaaagaaagaagggatcaaaacaggcagccgtcttttcgacattcctagaaggaaagatatccatgtcgtaaatccatccatggaaaggtatgtcaaggcttcgaactatgtttctagtttggtattacagtatgtggctcctgaggattttcatgcgtatagcattgatgagttgtttattgatgccacagcttctttgcatttattcgctcccacaccaaaagaattagcccgtaaaatcattaaagagatttatcgcaaaacacggctgacagctactgcaggcataggtcccaatctcttactggctaaggtgagcttagatcatgaggccaagaatagcacaacaggggtagcttattggcgatacgaagatattcctttcaaattatggtcgattcacccaatgaaggatttctggggaatctcgtccgctacggaaagacgcttaaatcgtttaggtattcactccataaaagaactcgctctttcttctgtagagatgatacgtaaagaatttggtgtcttaggagaggaaatccaccaacatgcaaatggaattgattttagtcgcatttctgacgtgtatattccgagctctcgatcattcgggaagagtcaaattctgtttcgagactatacaaatcgaaaagaagtagaattgctgctattagaactattagacgatgtgtgctttcgtttacgtatgcatcaagtcgtggcacaaactattcatttatccattggctacagcaaacaaacaggtggcggcttctcaagacaaaagaagatggggcgggcctcgagtctaagtcaagatatctttccttattgtttaaccatcctacacacatttgatagcggaatgcccattcgatcgattggaatttctttatcgaacactagtattcaagaagaagagcaaatgagcttatttgaagatattgaccagcgtgaaagagcctatgcgcttgctaaaacaattgatgaaattcgtatgcgttatgggaagaatagcgttctgcgagcttcaagccatctcgagcattcaacagctcgttatcgaaacggccttttaggaggtcataaagcataaaggaggaagatgacatgcaaaacagaggaatgaaaaaatggcgaccgtttgccactatgcccgagcaatacagaggattacaggaaatgataaaaaaacaagcagaggtacctcaaccttttttaacagaagatcaaatggaacagattaatttcatcttggttgaagccttacatacaaataaacaagtctaccttacatattacaagaaaggtcaatgcataacagagacaggattcattcagtttattgactcccaagggaaactaattgtcttcattgatgatgcatttgagttaaagaataaaatgagattaaacgtacttatcgatgttcggttcgtataggttagatgcatgaaggcagtaaattataaacgattattagaagccagctttctctttgagcgtccccaactatgctgttactttattgagaagaaatcaaattcataagcgtcctttcttaacaaacataagatttacgtattagtgtttttatgaaaaattaggcctaaacttttactaatcattaatttataacaaaggggaaaaaccgttttttcttttattggatcatacaggaaatataatgcatgcataatctaaaattagttttttaggggagaaacaacaatgagttctacatacaaccatttagaaaatactaaaaaaggagttaccgaggggtaacttcttttttagttatggttactcacgtcattcttatctttcataaggagttgctttaaccgttaaggaatattataacttctcgtccaatttataaagagatatgtgaagaccatcataagcatataaaagacaggtacaacttgcatcactaactactctttatttacctaaatagctacatattatctgaaaaattacgacttcgttacctactcattcggcctttatagtggctagagttctatatcatatacagaactaatttaaataaagacattatcaaattaaaataaaaagccacctctaattactatagagaggtagcacataatgaaagtttaataaagatagaaacatgttaattatggccaactactgagtgtggtacatatggctctttaagaaacgcaatttcctcagctgttagcttaaccgataaagcacctacagcaccttcaagatgtgatatttttgtagcaccaattataggggctgttactggttctttctgcagtaaccaggcaagtgcgatttgtgtacgaggtataccatatttttctgccatgaacgttactctctctacaaccaatcgatctgcgtccacagtcgcatcatatttagatttttgaatttgatctgtctcagaacgatgtgttgttactgaccagtcacgtgttaatctcccggaagcaagagggctataatgattggattttagaaattgatgttgaagaaacaaaaacacagtatttgaaaaaaggggatttgtgcgattgtctatattgtctaaacttctatgaagctatgaagtcacgatcagagatagagtttcagttttttaaccgactaggtattaatccttctcaatgtaatctcttatcacattttgaccctcaagaaaatggactccacttctatattggctgctatcatatggtaggtaaggtatctaacaaaacacctcttaacattatgaattcagatggtgcaattgaaataagcaataacttacatattggcttttccaacgatttagaatttgtccctggcggatttaccagacccgtacttcaacttgattttgagatagaagtcccttgggtacttgttgaaaagccaaattaaagtaatgtcaaatctaataaatttgtttcttaaaaaacctattcattacggtaactagagttagtatttttattccagtataggataatccaaatttagccatattaaattgtagtattaaaaaaggttaatacatatgaaaaattcttaaaaggtggatgttatatgcttgattctaaaacgattgaaattgtccaatcaacagtgccagttttgaaagaacatagtaaacaaataggaaagagattttatgaattgttatttgaaaaagcgccagatttatataatatgttcaatcaaacaaatcaaaaaagaggaattcaacaggaagcgttaggatatgccgtgtatgctgcaggggaacatattacaaacttagaagccattaaacctgtaattgaacggatttcacaaaagcatcgtgcgataggggtgaaggcagaacaatatccagtcgttggtgaaactttacttcaagcagtaaaggatgttttgggagatacagcttcagatgagattattgaagcatggggaaaagcgtacggatatattgccaatgcttttattgagctagaagaagctctctacgaagagacagagagtcaacctggaggttgggaaggatatcaaagcttttatatagataagaaagtagaagaaagtgataatgtaacatctttttatttaaaagctaaaaatgagaaagaaattgcctcttataaagcaggacaataccttacattagcagcaaatgttccgggagagaaatacacgcatattcgccactatagtctttctgaagcccctggaaaggattattatcgaatcagtgtaaaacgagaagatgggcatgacggtgcgccagcaggaatcgtgtcaaactatttacataaacaagttcagacaggagatactcttaagttctcagctcccgctggagattttgtacttgatcgcagtgaacttccggttgtgctaattagtggaggtataggtattacacctttgcttagtatgctgaataccatcgtagaaaaccaacctacacgtaaggttacctttcttcatgcaagtattaatgggaaaacgcatgcttttaaagaacatgtggctcaactaaatagaaataacgaaaatgttacctccttcatctgttatagctcgcctaatgaaggggatcgacttggcactgattttgataaagagggttatattgatttagaattgttacaatccgttgttccttcaaaagaagctgtcttttatttctgcggatcgattccgtttatggaagctattcttaaagcattacatagatgggatataccaaacgaacgtattcattacgaggtatttagccctgtagccattttaggagaaaaataaagaagtaattgttaccagtaaacggaaaatgttcgattaaaacacacgtcctgtttaaataaatatgctgtaaaaaagcactcataagcgtgcttttttactttgccctaaggaatgattctacaaacgatcatgatacatataagtatttctacactctctgcgtacaaaaaactggaaaaaattctcttcggtaatttataataatagagaactatgtcgaatcctaaatattggagagattactatatgagaagactacttccttttataatttttaccatttactgcattccatatgtttatttatctatgcgaaaagattttgaggatgattcaaaggtaagctatataatcatggccatagttacactagcactgtcttatctaagtgggcttattagagcggatttatcacttattttagggaatataatttcttttagtacttcatatttttataacgcattaaggcttccggattctaaatgggagaaatatttttcgccctttaattctgtcgaacaagtagtactgataagccttgcggcgcttgtgctgcaggtgattatttatacacttgctagaaaacgagcgaagagatacattcgtaatactatggtttcggaataattcaaaaaaagagagttaatcatctaatgaactagactcttcaggtgaccaaatgaaagaagggttaaaatgaggagagatgttgaaattttattctctaaaaagaaagtgttaaatgaggcagaacaacaaatccttcaaacgtgtacttacttgctttaaaaaggatgcgaatcaattagataagttagttatacaacttttaaaaatgtaaccgcaaacaaaaaggtatgtatttctcttcctactttaattataccacataaaaaaacgccgatatagactgtttattctcatttactgctggtaaaatcaataaaacattaccggttaggagagatgttgaatgaactctttagttcttagctttcaagaaataaaagatacacagctttcacttgttggaggaaaagccttaaatttaggcgcgttatcaaaaattcaaggaatacaagtaccggaaggcttttgtgtgacagcagccgggtatcaaacagcccttgaacaaaatgaaacgtttcaagcattactgaaccagctgacgatgctaaaagctgatgaccgagatcaaattggtgaaattagcgaaaaaattcgccaaatcattctggaaataaaaattccttctgacgttgtaaaagcagttattcattctctctctcagtttggggaagagcatgcttatgccgttcgttcaagtgcgactgctgaagatttgccacatgcttcttttgctggtcagcatgacacctatttaaacatcagaggcaaagaagctattgtgcagcacattagcaaatgctgggcttccctgtttacaaatcgcgcggtaacctaccgtattaaaaatggatttgaccatagtcaagtgcacgtatcggttattgttcaacgaatggtttttccgcaggcttcaggtattttatttaccgctgacccgattacttctaaccgaaagctgttatcaatcgatgcgggatttggacttggagaagcgctagtgtcaggtttggtctctgccgattgctataaagtaaaagaaggaaaaatcgtcgataaaaaaatagcagctaaaaaggtagctagttacggattaaaagaaggcgggacagaaacgaaggaagttcatttcgatctacaaaaaacgcaagcgctcactgactttcaaattttacagctagaacgcgttggaagacagcttgaagcttattttgattgtcctcaggatatcgagtggtgcttggctgatgatacattttatattgtccaaagtcgtccaatcactactttatatccaattcctgaagcacatgatcaggaaaatcgcgtttatatatctgttggacatcaacaaatgatgaccgatgccatgaaaccactcggattgtctttttttctgttaacaactaatgcaccgatgcgtacagccggtggaaggctgtttgttgatgtcacccctatgctggcgtcacctgacagcagaaaaatgatgttaggtgcgatgggacaacatgatccgctcatgaaagacgcacttacaagcataatagagcgaggagactttataaaacctttaccaaatgatcaaagttccggtaaaagcaataaaagcgtgcctcctatgaagcctaaggcacaaatcgaaaacgactcgacgatcgtttctgacttgatcaagaagaatcaagcatcaatagaagagctaaagcaaaccatccaaacgaaatctgggtcggagttagtcgattttatttcaaaagatatcgggacattaaagaagattttatttgatccacaaagtacagctgtgtttatggccgctatggatgcttcatcatggattaatgaaaaaatggagacgtggctaggtgaaaaaaacgcagcagacgtgatttctcaatctgtaccaaacaatattacatcagaaatgggtctggcgctattggatgtagcagatgtaattcgtccttatccagaagtcatccattatttacaacacgtaaaagatgataactttttggagaacctggtggagtttgaaggcggagagaaaactcgagatgctatctatgattatctcagcaaatacggaatgcgatgtcccggcgaaatcgatattacgaaaactcgctggagcgaaaagccggctgcacttattcctgtaattcttggtaatattaaaaactttgaggctaacgctagcaagcaaaaatttgaaaaaggcctgcaggaagcctttgaaaaagagcaagagctattaaaccgcttgaagcaattgccggatggtgaacaaaaagcaaaagaaacaaaagaaaagattaatctcatccgaaattttatcggttatcgtgaatatcccaaatatggcatgattaatcgttattttgtttataagcaggctctgctgaaagaagccgctcagcttgtaaaagccggtgttatttctgaaacagaagatatatactatctgacgtttgaagaacttcaagaagtcgtgcgcacacataaaatgaatgatcaaatcatcatcaaacgaaaagaagagtacaaattatatgaaaagctaacgccgccgcgtgtaatcacgtctcatggcgaaattgttacaggtgtttacaaacgagaaaatcttccgtcccaagcaattgtaggtttaccggtttcttcaggagtgatagaagggcgagcgcgcgtcattttaaacatggaaaatgctaatctatcagatggagatatattagtcacttcctttactgaccctagctggaccccgttattcgtagggataaaaggacttgttacggaagttggcggactgatgactcacggcgcagtcattgcacgtgaatacggattgccagcggttgttggagtagagaatgctactcggctgataaaagacggacagcgaattcgtgtacatggaacagaagggtatattgaaatattgtaaaagctaaagatgcttgcgctgtttttcttctttattaatagatgaaaatttgtgtagattcctatacgtatcttcagtcaatacaaaaaggcaggccattataacggcctgcctttctcaaaataacccttactaacctacctatcctaatatatggagatatgaaaacaaaacgtgttatgatagtatcggtgataattatgggtaaaaaagcagataagacgaatgtcatgcgaattttagatcagaaaaaaattgagtacaactattattcttatgacactaaaaagctgagtggggtacaggtagctacttcgcttggagaggaccttgctaaagtctttaagacactggtgaccgtagggaaatcaaaagaacattatgtcttcatggtaccggttgaaaaggagcttgatttaaagaaagcggcaaaagcagctggtgaaaagtctttggaaatgattcctcaaagagagctgttgcctcttacaggatatgttcacggcgggtgttctcctatcggaatgaaaaagcagttcacaaccttcattgactctacagcagaagactgcgaaacgatttacttttcaggcgggcgtgtaggtcaccagatacagttaacattaagtgacttatcaaaagcaattcgtatatgtccggcagatatcacaaaagagagttaaaatgtatttcccttgagcgaaacgcttttagacataagcgtttcgctttttttaaatggctttaattgctgtctttttatcggttgggataacagaaataaaagtaaaaatatagaaaaaatgatattatatagttaatgtgtggaaactttataaaaaggctaggaggaaagcaaaaataattaaatcaattattggaggattcatcttatcttttattcttttattaggatgtacaatagcaaacgtaaattcagaaacagtattttttgccgttttcattctattagtagggctagccatcattatatctggagtagctgtaagcggtgatcgaatgagagctaatctggccacggaatcaaaaacagacaagaagtggagaattacaaattctataaaccttatgttagctgctgctccagttctcggggtatttcttctcattcattattttatatagtttggtttccaaacaacaagcttaggtgaaaaatatctcgggatagaacgctttttatgtgaatttaaaatcaaatgagccaaattaaggtcgccaatgcaacaaaattatagagcatccatggctgtatatataataagggataagattaaaattcgataattatcttaaatttaggttagagcttagtacaagttatgtttattctacatattatgtaaatgtaagcagcttacactcacaagttgataagaatattttcttaaccatgttctcacttaaagaacatggctttttttctgtttgtcatataaattagaaagccgaactttgtaaaatttttgtataaataattagaaaatattatattttctaataaatcaatagtacaatatataaatggaagggaggattaacactacatatgtaatagacagccgccgcttttaaaaccgcttattttattatctatagatgatattgaaatcaattacccaaccttttttaagcgctctcattatataagtaattggttgaacaggttttataaaaagcaatacagtctagctgtttaaaaagatttgctggtaaattacttgctacttcatgttacaggagaatcaacattaaacactcaaagaaaagagggatcactcatggctcataccagtgaagctgcaaacaacaggcgtgttacaagtaatatttttaaaggatctgttgggaacttaattgaatggtacgattggtatgtttactctgcttttgccgtctatttttcatcgcaattcttcccggaaggtgacccaacaagtcaactgcttaacacagcggcaatctttgctgtcggtttcttaatgcgtccaatcggtagtttattaatggggcgctatgcggatcgatatggtcgccgggctgcgcttaccttatctattaccattatggcgagcggttcttttattatcgcttgtactcctagctatggcacgatagggttattatctcctattattctagtactagcgcgtttactgcaaggaatctccttaggaggagaatacggaacttctgcaacttacctttctgaaatggcaagcagcgggcgaagaggattttattcaagctttcagtatgtgacgcttgttgctggtcagctggtggcattaggtgttcaaattattctgcaaaacgttcttagtgaagcagatatgatttcatggggctggcgtattccttttgttattggagcaatcggcgcgctaagcgttttatggctgcgccgtacaatggatgagtcagaacaattttctaaaatggactctgaaagccgtgaaaatgcagggactattaaagcacttatgaagcatcctaaagcagtgttgaccgttattggcttaacattaggaggaacggtcgctttttatacgtatacgacgtatttgcaaaaatttatggtaaacagtgtagggctggataaaggagttgtaagctggattaacttctgtgcactgcttgtatttgttgtcatccagccaatagcaggtatgctatctgataaaattggacgcagaccgctgttaatgagctttggtattttgggaacattgctgactgtaccgctgtttctttttatgaaacaagcacataacccagtcatggcttttttattaatgacagttggacttatcattgtaacaggttatacatcgattaacgctattgtaaaagctgagcttttcccaacagaaattcgagctcttggtgttgggttaccgtacggacttacagttgccatatttggaggtactgcagaatttattgccctatggctgaaaagtatcggccatgaatcacttttctttttctatgtagcagggtgtattgccatcagctttcttgtttattggcgtatgggagagtcctctaaagattcatacatagaatctgagctcaagaaagaggacaaaggagacaatgtaccgccaaataatatcagtttttaattttggttaaataaataatcgtttgataacataaaaaaggacgggcttttatagccagtccttttctagtattccgcgcgtatattcgtattaaacgtattaaggactgttcttactatagaattcttttttctatagttttatattatgaatttgtacactatttggtgataataaggcctcgtataatctcattccagtaatgtttaaaactaggctttgctttcgtcattatgaacactccttttttaaattttttgattggctagttgttatactaagtttaataaaattacctaaagttgttatccaacgcagagcgtaacttagtatatgaatttgtacgactaaagaatgaagaacaaaataattagaggcatataaaaagatcagctacataataaaaggattattttgtgatataacgaaataaagagtatatacatcagaaatagagagagggtaaactccgtgaatactttatattccttttttgcgaacccagttttaactgtttctacgtttttaatagaattacagagcgtgttctttcaacctatttggaaagagtataattatgatgattattttacttacaaggtgtatgttccaagtacatatactggattaagcaaagtaccattaatcgttatgcttcatggatgtcaacaagatgcagatgattttgccgcaggtacggagatgaataaactagcggaagaaaaaggctttattgttctctatcctcaaatgaactactttgctaattccaacgggtgctggaattggttttatgagtataaccagtttcgcggtaatggagagccagacataataaaagatatgattgatcacataaccgctaagtatgcgattgattctactaatatataccttgctggtatgtcagctggaggctttatggcaaatgtgatggctattgcttatcctgatgtattcaaagcagtaggcattcattcagcaggcagtaatgcgtatgctgtagacctcatcacagctggagaagtcatgctatacggctctttaaatcctgaacttgacggtgatgaagcttataaaaaaatgggaccttatgcacggcctgttcccatcattacgtttcatggtcaatcagatacaacagtcactccagttaatgcgtctacattaattcagcagtggatttatacatataagaatttcggtataaacctacatgaaaatgctgctttttatacgtcacaagacaacggaaatcattatagctacataatgtctgactacatagatgcagaaaataaaatctggatgaaaaaaattatggtagaggatatggggcatgcatggtcaggaggaaataacaatggatcagacactgattcaaaaggtcctaatgcttcaaaaatgatgtgggacttttttgaagcacagaatgattaaatagagtatgaacgcgcgatcaagatgtactgctaaataacatcagccttcatttttttaaaacaaataattgtctaccaacagaaaaaggatcttatcgaaagatcctttttctgttatcaacgaacattttttaacaagtagcttcaaaccgatttaacaatacatcgagatcctgactaattttaatcgtattactacttgtaaacccttcttctagggcaatcatcatcatcatttttcgtataaattctatctttatcagcagtagtctacatttgaaacacattaagtttcctccacttgccacgtcattttaaaggcttaaattgttaaattatttatgtaaaaatggttccaatctaaaaatagaacctaaaaaatatagtaacaaatagatagtgtcgaagtctgtcgtattttgaattaagatattttcatttaaaaagaattagctcttaaacgttatgctagaagctatgctatgtcttaattatgattgttccaccggttgtaaataactcacagagcaatagagcttatccggttttttggatataggcataatccgattacatttaggcatgttaacataagaaaggagaatttactaatatgcccaacgtcatcagaattcttcaattgtttcttccatggatttcccttgtttttatgccaaaaaaatcaatgagaacctattttcccgcttctctatttgcctcatctttagtaattggaatgtgctcattagctattccttacaagtggtggagtgtaaaaggagggtggaaaggaaaaattttaaacgatagcagctttatttttggcccctttttgatagggacactgtggatctttcattttacgtttggcagctttaagagattttttttcgttaatttacttatggattcactatttgcttttccgctaagctacttgtatcaaaaattggacttatttaagttagttaactttaagccaaaacatatctttttttcgtttattagtttctgcttaactatttatggctatcaggcactgacaaataaagataaatgataggtgagggccgtttctaaccgctatagactttgtaaaaatcgcaacaaaaaagcgtctgttaagacgctttatatataatacatatcctgctcttctttattaacatttgttgtttcatggattatttcttccgggatattggacgtccgattagtaaaaagcataaacaaagcaataattgatgccgcaaaacctaaagtaacaatcacaataaatccctccctttagaatatatattctacttttatcttcattttcctatatttattatatacccttattttattttctcaacacatagaataaaaagagtagggcatctcctcaatatnnnnnnnnnnnnnnnnnnnnnnnnnnnnnnnnnnnnnnnnnnnnnnnnnnnnnnnnnnnnnnnnnnnnnnnnnnnnnnnnnnnnnnnnnnnnnnnnnnnnacctcttttatattcaacagagctgattgctactgagaattgttactatttatcctatgtttaatctgtaaataaacgtaaattattaatgtctatttcagtatttaagatatctcttcattaagaattttatttacttcttcaataattttaaaatatgacggttagctatacctcattacttgtctggcaatgttcatttattcaacaaataaggtatacggttactatttcaacaaacaaaaagcgcattcctatgttgatttatagaaatgcagctttttaagttgttattttatgttttaaatataaacacccaccagattatctattaaggtgtgaaacgttttgcttcactctcttctggataatctaattcatttggtgtatagctaatgagttggattaacattccccaaggtgcacgatcatatacaaaatgtgcatttttcccactaaggaatttccagtaataaaaagcccaattactcaatttattgactgagaaactgggctttttcgttactacataaaagtgtccaatcgttgaagtttattactaaaatcttcttgcagataagcatgcctaagtgtaaatacagcattttaaacggtcatctgttttttaaaattttactcagagattgatcgaatagggtaacaatcagaataaaacaaatgattaaactaaatagtgctagatgatggattccttttgtatttgcttcagatttaaaaaacaatccgtttgtggcagaagaaagtatagttcccatgtacataaaggttcttaataaaccagctgaagcaccaatgtgtttgggcgaagcctgaaaatagacagcattttggttagctaaattcaatatcccttggggaattccaaatagaatagcaatgataacaagataaaccagactgcaaaatgactatctatcctcgtatttctagatttcgagctgttaaataggtcttacaaaggatacccttgacttcttttaggttgggcgttgaaataaaaggagaatacatttattgttaaataggtgaacatattaacatttttagtaaataggtggtagagaaattgcagggggataaaggtgttttacaacaaactttacttatagagatagaaaaagagagggaaaagatgattcaagtagcacgagaagaaggtataacaagtgatggcacacttcaagtgagccgatccattgatcaattgttgaatgaattacagaaggtaagcttaacgaagtaagtattcgtctctttataaataagaaacgatcgctttctctcagcattggcctagcaagagaaagcgatagctttttagtaagtggtgattaacttactaatcgacttgtaaattataaataatttggataataaagtaaaggtgtttttatatttttatttatatataaaaagctatctcgacattaacaaacgagatagctttttagtaggaatgctaattataaagtaccaaaatataaccgcatgtacacaacagcacatttttgctataaggactaatggttaggtacactgccatatgtataaaaggtaggttttttatacattatcctctcaactgataaacggaaaaaatcagttataccaaagacgtataagaaactgtatatccaataaaaaaaacttccaagaacccttatctataagggttctttcgcttgcttggttccttgaagagtgattatgataactaagattgtatatgatatttatagcgtttgcttgttttaatcccatattctagggcgatcaacccccatgatccttagatattgtaagagttgtccagcatgtacggattcatgatagcctatccgcatcaacatatcacctagggaacgaacgtagcccacatctgaacggtctatttgaatagttgttaaatcttcttcagaaaaagtactaatcatttctaaaaattgttggtggtatgattttgcaaattctaattcatcttttacagaatttaatggtctcttttcgaaaggagaattaaattcccttagactacctgaatttttaatagctaagtggtagtaatattctgattctaaaacatgacggatcatttctaaacatggcatagcccctttatccggattccaatcgagtttatcttcaggaattgcttcccaaacctttatacttcttcttctaatctcttttaaatttattaatattatatctgttacattcatctgtgctcccccttttatcaatattttgcataatttctctaaaataaaaatgtgaatttctagctaaacttatttcgagtacttctggttcttataaaatcaattatgataactagaactattctattaggaataataaacggttataaaaattaattaaatactatttgtttcttgattaatttacatttaatgttaaaaatgatcatttttaactaaaattaaatttagtgattttagcattttattacattttaaatatttattatatttatggtataggggatttagagtaaccagctataacatttgacaaaaaaactgttatttcatctggattttacacatgggtactaacaccggttcgcttgttcaaccatattaccaaaatgtaaataataagggagtgaaggacttgcaagtgaaacgttgcctttccgcattgtgttttctttttgttatgatgggatttatagcagtgcccacgaacggggcgtatgcagaaaaagagtatacaattaaaacatttgattatgtaactgtcgatggaaaagatgtagattctcaggtcaaaatgaatagcatttctaacaaagatatacaagtaaccatggttctacctaaacagaataaagaaggcgcttggttggcatatgggtttacgagccgggaggctttgaacgcatttattgagaaagataaacagagacttcaaaacaaagtcaccatgatgggcagtggtgcttgttgtacggatttctacgagtctaaaaataaaggaggccagtacatttattggagagacggttttaaaaacttgccttccagctggaacgacagaatttcgtctttaagcacggcatcaccttcttcaagctattcaacgactctctgggagcatacttcatctcaagggtatggcaaaggagtctcttttagacactctgattggtatggtaaaactgccaatatggcttcagattgggataacaaagcttcggcaattgaaataaaataaacaagagattatgagcgaataagtaaagatttcttaaaaccactattctctcacttatttagaaaaagcgagggaatagtggttttttatggactttgtctcaatctgagcaaaggtttcttttagaatttatttatttaaccttgttgatttagaagtaaatttctctttatttttaaacaagttaactccataacctgcaagacctccaataattgcagggaatatccaacccaatccaatatggtaaagaggaagatagtaagtaaataattggtcaataccagggatgtgtaagccaaaatcatttaatccatctaccaggcttacaacaaacgttaagaataggctaccttggtatacctcagcacatcctttaaataaagaatgaaggaatgtcaaaaagattagcacaattgctaatggatagagaactgttaaaacaggtactgaaaaagaaattaattgatttaatccgacatttgcgattattgcgctaaatatggataggctaatcgcaattttcttataagaaatagatggtaataatttatggaaataagaagagcatgcagtaataagtcctacgctagttgtcagacaagctactgtaatcattaagcctagcagtacgcctccgtattctccaaaataataattagatacttttgctaagaccgcacctccgttatctaaatgcccaagcttttctacacttgaagcacccatatatgaaagggcagaatagatagttgcaagaataatagcagcaattcccgtagcttttaggcaaacagttataatttgcttctttgttttagcgcctttttctttaattgcattgataataatgattccgaaaacgaaagatgcaagagtatccattgttaggtatccttcttggaatccattaaaaaaagagtttgttacatatttttctgtaggtgcttgaaattttccaataggatgaataaaagctactagaactagaattccaatgaatgttaatttaattggcgttaagaattttccgacaatatcgacaattttcgccggattgagagaaaaaaagcatgtaatactgaaaaatataatagtaaatatgagtaaagctatagaactagagccttcagaaatgaaaggtttaagtccaatttcaaaagagacattacctgttcgtgggatagcaaataaaggtccaatagctagataaagaacagttgtaaatactaaaccaaagataggatgtacgcgacttgctaatgattgtaaatcttcctttccggagaatccaaaagctagtacaccaagtaaaggcaagcctactccagtaactaaaaaacccgcatttgctgaccagatatttgctcccgctgactgaccgagcatggcagggaatattaaatttccagctccaaaaaataatgcaaataacattaaaccaatgattactataaaagaaaacggtactttgtacattattaatcgttgagataacttttttgtattgtacgaatgaaagaaatttatatatattaaaaatacaaaatattcattaaattatatgatgctttggttttgagtcgaaaagagaaaagctgctgctttaaaggcaacaagtttaaggaagttacaagcgatataaaaagttatagaaatagatgcatctagaattctttttgctcaaatattcacagagttttcattcataaaaaagactgaaaattttgataataatttcacttttattaagggggactttttatgacaacaacggtattaaatgtatcaacttattctttttatcttaacggtgagtggaaagaaagtaaatcagggcagacaattgacattgtttctccataccgtcatgacgtgattggaaaagtgcaggctatcacaaaagaagaggtcgatgaagcagtacatgccgcgcaaaaagctcagaaagggtgggcagaaatttctctgcaagaacgtgccaagtatttatacaactgggcggatgagctggtaagaatgcagagtgaaattgccgaaattattatgaaggaagttggaaaaagcttaaaagatgcaaggaatgaagtagtgcgcacagcagatttcattcgctatacagttgaagaagcccttcatatgaacggagaaagcatgaagggagatagttttcctggcggttctaagtctaaagttgctattgttgaacgcgtgcctttaggggttgtactcgcaattcctccttttaattatccggtaaatttagcagctgctaaactggcgcctgcgcttatttcaggaaatgcagttatcttcaaacccgcaacgcaaggagcgatcagcggtattaagatgattgaagctcttcatcaagcaggtattccacaaggtcttgtaaacgtcgtaacgggccgcggatctgttattggggattatttagttgaacataaaggcattaacatgatttcatttaccgggggaacaaatacgggtactcaattagctaaaaaggcaggcatgattcctcttgtactagaacttggaggaaaagacccgggtattgtatgtgaagatgcagatttacaagaagcagcaaaacatattataagcggagcattttcttattccggtcagcgctgtacagctattaaacgtgtacttgtgcatgaaaaagtggcaaacgagctcgtaaatattttaaaagaagaagtacataaactatcagtcggttctcctgaagatggatgtacgatcgttccattaattgatagcaaagcagcggactttattcagattttaattgcagacgcgctcggaaaaggtgcagaagttgtgactggaaacaagcgtgaaggaaaccttatctatcctacgcttttagatgacgtgaatgatactatgcgcgtggcatgggaagaaccattcggtcctgtgttaccaattatccgcgtctcttctgatcaagaagccgttgatatagcaaacgaatcagaatttggcttacaagcaagtgtttttacaaaagatattaataaagccttctcaattgcaaataaaattgaagtcggatccgttcaaatcaacggccgcacggaacgcggtcctgatcattttccttttatcggcgtaaaaggatctggtatgggcgctcaaggcattcgtaaaagtattgaatcgatgactcgtgaaaaagtaacggtattaaatcttcaatgattgaattccaagagctctccaaatcaagccagtagagtgtagagaatctcaaaggaaaaagcctgtgctccaaaaagcacaggcttttaaacgttttatttacctatcactcgattccatctttatagttcttatgccagtttttatcacctttatgctcgatatcctcaacggttttttcaagctctgacataatgagtgttttcacttgataaatggtatcaaaaaaagctttctcttcatccggattcggctttattttggctgctgccgaaatatcaacatatctgcgatgttcagttgttaatttatcaagcgcatcaaaaatatgagaggtcagaacagcaacctccttatgattatcaggcagcttttcttttaatgtttcaattctcttatccatgttaaagtccccctataacgtgttgtatttatgtaactttcccactaataaaaatgaataaccttaaatagtaaaaaatcatgggaattagcacgtgaaacaaaagtatactacaggatatcatgttaaagtgaaaaaacggtgaaacgaatgagtatatttttccagaaagggtatgtaataaaagtggtttttttggaaaaggtaattcccttaagaaacattgaagcacgcaatcaacgtaaaagttcatctatttttaatgaacaatgaccttttttgactattttttacgtttttatgactttttttgaatgaatttgattgtttttgatgatttttcgaataatctgatatataatgaaagcgtaaacagtaaaacatgtcggttggttaagaaaaacatccacaaaaatgggattcgttattacataaaatcagacctctgtttttataaaaataaatagaatttgagaaaaggagaatgaggatggacatattggatgcaaaagtagtgaatacaaagtacggtttagaaacatatctagatgtgtcagaaagcgtagaaataaaagaaattcatatgcctagttcagagaaccaatctcataaaattaaatttggaatcaagtattttcttttaagagaaggaaagtattacgatagccaaaaaggttatttttggctttgtatgaatcacgattttagcagctttatgctgagtgaaacggaaacagagagtttgtttgcagttaaaagtgaagaagaaagagaagcaacaaaaacgctgttagcagaatggtttatccaaacgaatgcgtacaaagaagtcatcaacgaatgtatccatcagattaaaacggagaatattcgtacagaagaagacattgaagaccgagtggacgctatacaatttttagaaaaattaaaggtattaactgcaaaagagattgaaaacgcttctatagaaaatctatatgccctgcagcaaattggctaggctatagctcaagcaagttgaaatgcagattgatgtataacaataaggaggaatagtgagatgaaattttttattgatacagcaaaccttgaggatattaagaaagcatacaaagtaggtgttctagctggtgtgacaaccaatccatctttagtagcaaaagaaggcgtaagatttgaagaccgcatcgaagaaatccttcaaatggtaccggaagttgaatccgtttccgctgaggtaacgcctgacgcactttctgctgaagacatgatcgctcaagcagaagaactgattaaaattaacgacggagataaaaatattacgattaagctgcctatgacattggctggcttggaagcgacgcgctatcttgcaaaaaaaggcgtaaaaacaaatgtaaccctaatctttacagtaaaccaagcacttttagcagctcgtgctggagcgacgtatgtttctccatttttaggacgtcttgatgatatttcagaagacggggtacagctagtatctaaaattgctgagttattccgcgttcaaaacatcgactctcaaattatcgccgcatctgtaagacatccggatcatgtaacgcgcgtagcacttgcaggggctcatattgccacaattccatacgctgttattgagcaattagcaaaacacccgttaactgaccaaggaatggaaaaatttgcagcagattggaaaaaagcagttaaagcttaacaaaaaatcatatcaataaaaacagcttggaataagctatgcttactccaagctgtttttattttaactagctagtttctttttacgtaaacgctctaagcgtcgctgcacgctatttctcgaacgcccgagcaactctccaatttctcgctgattgcgcttttcctgatagaacataccccacaacctggcatcttcttctgctgtccactttttatgctcatatttagggcgctttacatagtctagctttctttgttcctccacccacgctggttctggaataagcgtatttttaggtattttaaaaaagttaaggcacgatttattttgttcagcccacttccaaaaagattgaatgtcaattcccatgaatgttcttgtcttggcgatgatcattttatacggtagattctctttatgaatccacttgtaaattgtatgaacatctgcttcaaggcaggctgctaattcacacgctgtaatatgtcctacgtgtgatttagctccatacacctctaaacgacttaacctcgattctagtgcttgcacacttcgctgcaatttcgctgatatgcgcgaaagggattttactccgtaataccttagcaaatattcgtcttcttgtactgtccatcttcgcatcgcagtttttcgtgttagtcccaaaacttttatgcgcgtagcaatagaagaaggacttctgcctaaggagtgtgccatttcacggttattcatgagatcaatgttctcctgtaaaaaagcatcttgttcaagcgtccattttttacgtaaagctgtatctgaatcacgaagatttaatcgagtaagccgtttgttaactgattctttgcttctatgtaaatgctcacccattttttgaagcgtcatcacgccgtaatgttcaatgagaaatctatcttcttcttgtgtccattgcttttgatttttactcactgttgtctcactccaattcaaacggaaagctcaagatgaaaaagtcgctagcaatctattttaccaatgagcagtacccatccagactgatactcactgcgttctagcctatgtatattttatcatatttctaaacaaaaaccaaacatgtgttcttcttttgttttagtaaatcttaaagtaagtagaggattagcttcttcctttaatagcagtcaattgtggtaaaattgactataatcgaaagaattttcacataactgacagctcttattattacgttaaaagtcatatttgtcgaaaggggaatttacatgaattttaatttaaaagaagcgattgaaatacttgagcatacgccacaaacgcttgaaaaacttttgtctggtctatctgcagggtggctgcaatgcaatgaaggagaaggaacgtggaatacctccgaagtcatagaacatttaatagaagcagaaaaaaacaattggataccaaggctagaattcatccttcaagaaggaaaagagggagcttttcctccgtttgaccgctatgcccatttaaacaaggaatctgctaattctattgaagagaagcttcttgaattcaaaaaggtaagaatacagaatttacatcaactaaagctgctagttaagcatgaaaagcaccttgaagtgagaggagaacaccctgagtttggggaagtaaaagtcagagagctgctctcgacttgggttgctcatgatttaacccatattgcgcaaattgttcgagtaatggcagaacgatatagagaagatgtaggaccttgggaagaatacttaggaatactaaagaaatagcaatgacacacagtggccagcctttatcattcaagcttgaattaagaaatgtacacgattacaataaaatgagaataatgaagattcaggaaggattgcagagggaactataacaacatatccgatgtttataacatgtagggtccgttaagcaatttacgaataaaaagaggattggactgattaaaagtgaaagtgaactcagagaaatttggcgaactaaacaatcaagctgtacatgcttataccttattaaatgatgaagggcttaaaatcacctgccttgactatggatgtgtaatatcaaatattgaaatgccggattctaaagggaagattgaaagtgttgtattgggatttgattcaatagaagaataccaaaagtattctccttatttcggagctgtggtcggacgcgtagcagggcgtataggtggagcatcgtttgagcttaataatgaaacctatcgtctagagaaaaatgaaggaaacaatcatttgcatggtggaaaagaaggattcagtcataaaatatggaatgccaaaactattgagacaactgatcatgtaggtgttgaatttacatatgtaagtaaagacggagaagaagggtatcccggcaaccttgaagtgaaagttacgtatacattaacgaataaaaatgagttccatatttcttatgaaggaacaacagatcaagacactcttatcaatttaacaaatcatacgtatttcaatttaagcggaaatctaaaagaaacggtcttagatcatgttttgaagatgaaaagtaacgaattcttagagttaaatgatgatcttttacctactggagaagtgttaaacgtcacagataccccatttgactttagagaaggacatagtctcaaggaaggtgtggactctgcacatccgcaaaatatattagtgggtaaagggttcgaccatccatttcttttagaagcagaagctgaaaatcagatgtcattatttgatcctgcaagcggccgcaaaatagaagtcaaaacggatcagccttcagtcgttctctatacgggaaatcatctagacgaagagttcgaaattagaggggttcactcagagaaatacctcggtgtttgcttagaaacacaaggtttgccagacgctattcatcataagcattttccttcttgtgtattaaagcccggtgagaagtataaggcatatactcactatacatttataactgatggcagcctgtaacaaagcgggatgataaaaaggattacaaacgagcctctgccgattgtaatccttttttattgttattttttcttttggctttttgcgcgattagcgtcaagctcagccgcatattcctcttgagactttccttgcttttgactctcagactgaatctttttaaatttgttatcgtttaaatttggcatattagcacctccttgcagacaaggttattttgtacaagcattaaggatttatatgctaaaaagttttaatgaacttgattagaaatttcgcttaatgctgcaccggcttcatcaacatatacgtttactgtcgcaaggtcgccgattgcacagattccaaccatattattattctccactacaataatgcggcgaatttgatggtcagccatcatacgtgcacactcatgaatatccgtatccggagaacaagtaattacatctttagtcatgcaatcatggcaatgcacagtgttgcaatcttttccatccgccacgcaatttaacacgatatcacggtctgtgatcattcccattactcgattttcttgacacactggcacagagccacaattaatatcacgcattaattttgcagctgctgttattgggtcgtgcggtgcacaagctttcacatctttagtcataacttcacgtactgtagtcatttttaattcctccttttaaacattcacctccgtattttctccatgcacatgcagaatatgagaatcaataatttcctgaaagcaaaaaatcttgtaataaaaggtgaataaaagaactaacgcagtgtaataaacacataaaaaagagcctattacacaaactaaagagaatatgatttagcttagattttcgtaacggcaggagttgggtacataatgaaaggaaagttaacgcttttggcagtacttttattgccttggctgtctatagtaaaagttgataaatttggctttaaaagatacctacctgttttgacatttagttcattagttattgcttttatcagtgagttatctaaaagctttacatggtggaaagtgaagaaacctcttttccctaaactttcaagcgacgtttcttttatatttggaccgttttttatagctaatttttgggtattcaaactgacctatgggaatttcaaaaaatatttgttaattaacgtcctgtttgactatctatttgcttatcctttgaccagtctggcagaaaaactgaaggtatacaaaatggtaaacatgactcgctttcaactttttctcatctcgattaccactgctcttattaattatttgtatcactattttatagaagatgtactaaggcagagaaggcaatagctgatatttcgttaaccagctcatcgccacttatatttcggtactgtcagctttaaatcgtattaaagccctcctaaacttggtacataagtagttaaacgagataataaaataaaagagaaacatgagagaagataaacctctttcacgtttctctgctttgtcatgcacctaaactttatctgtacaccgtcatgggcaagtatgttaaagattgacccgtagctgaagctgttaaatgcggttctaactcaaagtcttcaaatggttcaatatgagaaaaggcctctaaaaatgcttctaaaataattttcatttcaagtcgggcaagaggggcgcccaaacaaaaatgaggtccgtttccgaatgttaagtgctttttattagttggacgatgaatgtctacagaaaaagggttttcaaacatagtttcatccatattacatgcactcatccacgcaataacgacatctcctttttttagcttaacgcctaatagctcgttatcttgtttaaccgtgcgatctcgtctggagatatgaaaccgatatcgaagcatttcttctactgcttttggagctaattctctattgtttctcagctcgctgtataacgacttgtcgtcatataaaaaagaataaaacatatttgcaatggcgtgacttgtggtttcaacgcctgcacctagaagcaacatggtagcgtgtacaatttcttcatctgtgaatgtttcaccatcaacttcagcttgaattaagtctgagataatatcatcagaaaggttggagcgcttttcaatgacaatcgggtagaggtattgaaaatattcagctcctgcacgttgcttttcttgttcaatctcttctaatctttcttggtcataaggctgaaacagaatgtctacccattttttaaactgatatcggtcttttaccggtacgccgaatagatctgctataactagactaggaaaaggagaagataaatcgtccacaatattaatagttgaattcttttgtatcgcttctacaaggtctgctgcaatttgtttgattcgcggttcccagttctttaaactgcgaggagtaaaggctgcagcaagcaaagatcgcgctttccggtggtcaggaggatctaagtttgtaaggttggtgattggagatgtgctttttttcttactattatctccaacaaaaatagtggttctctgtccatcgcttgaaaaaaaatcgtagttgctcaagacttgtttaacatgttcgtattggaatacattccatgtgtttgtttcttcatgaaaataaacaggggagttgttcaacatttctttataccattggatagggaaaaactcttctgcacgtgattgaaattttggaatttctgtaacgggaatgacttctttgttcatgtgatcttattcctccttcagaataggtatagatttggaatttactagctacatagcgctcagtagttgtcacttgctagataaatagttactttgtcgaataacctatactattagtacatttttatacaattagtataaaaatgtactaatagtatataattatttttacttggttatcaaggaaaaaggataaaattcacgtaggaaaaggcagataagctatactaaataaaaagtaaattgtaaacagaggagtaacagcaatgaatcaaaaacagctagatattttagggcatacgcaccagctttttatggaaaaaggatacgtagacacttcggtacaagatatattagaaagaagcgggatttcaaaaggaacattttataaatatttctcatctaaaagcgaactgcttatctcattactttcgtctctgcaagaatcacttattctacaaagagaaaaagtagtcattgaatatagaggggataatcagaagggatttcaagaacagatgatctttatgatgaactttgcagagcaaaacaaaattcctgaaatgattgaaagtacactcgttttaaatgaagttaaaacatttcattatatagaggaattaaaagctgcaacattcaactggatatatgaacgttttcagcagatttttccgtctaagacttctccttatttatttgatggagctgtgctgctagaaggaatgcttaacaatatgtttaaaatgaacaaagcgctgaactatccattacctattgaacaaattgtccgttattgcatgaagcgtacagaggaaatcataatcgaagtagcagaacaaaaagaacagttatttagcccttccgtttactctgcggtatttaataagaaaacagaaagtcatttttcgacagatctgacgcgtgtaactgcgaagttaaaacgggtgattgaaaataaactaacaaatgaagaagaacgaaagagaagtctagaatttgttacgtttatatcggatgaattgctgcaaaatgatacggagcctcgcacgttcattattcagagctctcttttatcgctagagaaaatcaatactctcgcacagaccaaagagctagaggaatataaggaagtcgtaactactctgacaagacattcttcataatttaaaaagcatatgagctaaactaacagtgaaggctctgcgtcgtctaagaaagagaaggttgcctataaaacatataaacagccagttgccgttatgataggtgactggctgcattggatgaaaaaggtgagggtggagatagacataatactcttattaaaactgtttaaattccttccctttaatagaaaatagctccttcattcttaaaatcaaacgtgatatagtttactaacctttgtattcacttaactaacttataggggtaacacttaagaaagaatcaataacgatggaaacagctcctaaagcaggggcattttttcctaacgaagaaggcaatagttcacatttattgtctaaatgagaatgaactctagaagaaacttcgtttttaatcgtatttaaaacaatgggatgagattcaattatatgatttctcaagataacagcttctacatcaaatgtattaaggatattggttaatccaattccgatataaaagccaaagttttgaagtgcatttaacatttctacatcatttttatttgcgcgttccacaatctcttttcgagaaatattcttatctttttgagagagcgaagccagtaacgctttttcagaagcatataattcccaacagcctcgatttccacagctacatttggggccattaaaatctatcgtcatatgacccatttccccagaaaaaccctgaacacccttatacaattcgttgttaataacaagtccagttccaattccgacattaatactgatgtaaacgatgttttcgtagttttttgtcataccaaatactttttcaccgtatgctcctgcattagcttcattttcaacaaaaaccggaacattaaactcattctcaattaaaagctgcaaatctttgatattccaatttaagttaggcataaaaataatttgctgatgacgatctacaaggcctggaacacaaattcctattccgactagaccataaggggactcaggcatatgggttacaaaatcatgaataagtgcaaataaaatctcttttacttcactagcggaagaactagaaaagtcagaagtcttctcgagaataatatttccttctaagtcggttagaattccgttaaggtagtcgactcctatatcgataccgatcgagtagcctgcattcttattaaaaacaagcattacaggtcttctgccgcccctagattgtcctgtcccaatttcaaaaataaaatctttttcaagcagtgtatttacttgagaggagacagtagacttgtttagtcctgtaatctcagagagagttgccctggagacaggggagttctttaaaatttcatctaatattaatttttgattcattttttttactaaagcttgatctgcaatttgaataataaccgctcctttgtttatctatcgaactaagttagtgttttatgaagcttgaattagatatttaatagtatcatacctaatattataactaaattttctaaaaaaaacattgaaatagacatttattttgtatatgatgaaataaagttagtttattggataaacaaactaactttattaaggtagttgatggataaacttgttcacttaaatcaaagggggaaatgacaaatggtccaaactagtactaataaaattaattattttgaaagcgtaaacaaagttttatacgaaggtaaagattctaaaaatcctttagcttttaaatactataaccctgaagaagtagtaggcggtaaaacgatgaaagatcagctgcgtttttctgttgcttactggcacacgtttacagcagatggtacggatccttttggtgcagctactatgcaaagatcctgggatagatatgatggaatggatttagcaaaagcgagagttgaggcagcttttcaactttttgaaacattaaatgttccattcttcgcatttcatgatcgagacattgctcctgagggcagtacgttgcaagaaacaaataaaaaccttgatgttatcgtcactatgatcaaagaatacatgcaaacaagtaacgtaaagttattatggaacacagcgaatatgtttacaaatccccggttcgttcatggtgcagctacttcttgtaatgcagatgtatttgcttatgcggcggctcaagtaaaaaaggggcttgaaacagcaaaagaactaggcgcagaaaattatgtattctggggcggccgtgagggatatgaaacactgcttaacacaaatttgcagttagagttagataacttagccagatttatgcatatggctgtagattacgcaaccgaaattggatatagggggcagtttttaattgagcctaaacctaaagaacctacaacacatcagtatgataccgatgcagcaacaactatttcatttttaagacaatacggattagataaatacttcaaacttaatctagaagctaaccacgcaacgttagctgggcatacatttgaacacgaattacgagtagctagagtacaaggcttcttagggtccgtggatgcaaaccaaggtgaccctcttttaggctgggatacagatgaattcccaacggatttatattctacaacgctagcaatgtatgaaattctgcaaaatggagggctgggcagcggaggattaaactttgatgctaaagtacgcagaggttcttttgaacaagatgatttactctatgctcatgtagcaggaatggatgcgtttgctcgagggttaaaagtagcacataaattagtagaagatcgtgttttcgaaaatgttatcaacgagcgctacagcagctttaaagaaggaattgggcttgagattgtggaaggaaaagctaacttccatacactggagcagtacgcgtttaaaaatccgaatattgcgaataaatcaggaagacaagaacgtttaaagtccattttaaatcaatatattttagaagtttaaaagacaaacgagagtagaaacaatttctactctcgtttataaacgcggaggtatcaagatgaaatatgtaattggaattgatctaggaacaagcgccgtaaaaacggttttagttgatacaaaaggcaagatttgcgctgtggtttctaagaattatcctctccttcatgaaaaaacagggtatagtgaacagaatccagaagaatgggttcagcagacggctagtgctttaagtgaattaattgctaacgctaatataaaacccgaagatatagaaggaattagttattctggacaaatgcatggccttgtgatgctggatgaaaactacaacctattacgtaacgccattttgtggaatgatacaagaacaacagaacaatgtcatcatctctataaagtcattggagaaaaacgtcttttaaagataacaaaaaaccaggctttagaaggatttactcttcctaagttattgtgggtaaaagagtatgaaccggctatatttgaaaaaacagctgtatttatgctgcctaaagattatttacgctttaaaatgaccggctttattcatagtgaatattcagatgctgccggtacattattattaaacatcagcaagaaaaaatgggatgatgagctttgccaattagcaggaatcaatattaatctttgtccgccactagttgaatctagtgaatgcataggcaatattagtgaagcgttctctcaaaaaacgggattaaccacttcaacgaaagtatttgcaggtggagcagataatgcttgcggagcaattggcgccggcattttatcatcaggggaaacactatgtagcattgggacatcgggtgttgttctttcttatgaggaacgaagcgatagagactttgatggaaaagtccattattttaatcatggaaaagaaaatgccttttatacgatgggcgttacgctatctgcggggcacagtttaggctggtttaaggacaatttcgcaaaaaacgtcacgtttgaagaattattggctgacctaaaaaatgtcccaatcggctcaaacggccttttatttaccccttacttagtcggggaacgtacaccgcatgcagatgctacgattcgcggaagttttataggaatggacgcctctcataaaaagagagactttacgcgggcagttattgaagggattacgttttcattaaatgaatcaattgaaatttttcgagaaaacggaaaggaaattacgtctattgtatcaatcggcgggggagcaaaaaacgatcactggcttcaaattcaagcagacgtttttaatgcgaaaatcgtaaagttgtctactgaacaaggcccagcgttaggagcagccatgctagcagcttatggctgtggctggtataactcattggaagagtgtgcaaacgtatttattacgtcttcgaaaacatattatcctaacgcagaacatgtacaagtctataaacagctttatgaattatataaagaagtatatcctcaaacacacggcttaagtaaaaagctaggcgaatttaaaaggaagtaataggttgaaaaatatgcaaccttgctttaaaaaggagcttcatataaaagtagcttgtattaattgattatggttgtatatcgatatacctgacacaaaaggaagtatagaaattgctgtagtaagagttgattcaatagaaaaatacgtacattagaggggaggataagagcagttagttgaatggacgaagaatatttcttttgtgttccaagaatttgaaaacgcattcaaataagtgcgaactcagttagaaatagaacttctgctgttacccttaactgcttttaacaacgcatgaaacaaaatcgaaactcattatatattttttctattaccttagttgccgctatcggggggttactgtttggatatgatacagctgtaatatctggagctgaagaatcattaaaggtgtatcttattgacagcttaggattaggatctttagcacacggtgttactgtatcaagtgctttgatagggtgtattattggaggactgatatctggttattttgcgacgaaactaggacgcaaacaatcacttatactagcagctattctttttatagtctcagcgttaggcgcttcttatcccgagtttttattttttacaaaaggggaaccgacattctctttgttactagcttttaacttctaccgcattataggtgggattggtgttggcctagcatcagccatttgtccgatctatataggagaaattgcaccggcagatattcgcggcagattggtatcgttcaatcaatttatgattatttttggaatgttagtcgtttacttcgtgaattggggtattgcaaatggggaaaccttagaatggattaatgatgtaggttggagatacatgtttgcttcaggagctattccagctttactttttgcagcactcttgtttttagttcctgaaacgcctcgctacttagctatacagaatcaagatcaaaaagctttagccatactaactaaaattaatggatcttcagaagcgaaagcaattttagaagatattaaacaaacaatttctaccaatgtttcgtctgaaaaattattggcatatggaaaattagttatcgttgtaggtatactgctttctgtatttcaacaatttgtaggaatcaatgtagctttatattatgctccgcgtatttttgaaagcatgggagcagctaaaggttcttctatgctgcaaaccattattatgggattagtaaacgttatttttacagtaattgcaattttgacggttgatcgtttgggaagaaaacctttattaataacagggtctatcggaatggccattggaatgttcggtgtagcaagcatggctttttcaaacatcattggtataggaacgcttgtatttatcattatttatacagcttcctttatgatgtcatggggaccaatttgttgggtgctcatttcagagatttttcctaataaaattagaggtcgtgctgtagccattgccgtagctgctcagtgggcagctaactattttatttcctctacgtatcctgtgatgatggaatatagcggaggattaacatatggtttctacggtttaatgagtgtactttctgctttattcgtttggaaatttgttcctgaaacaaaaggtagaactcttgaacaaatggaaaatatgtggagaaaaaaacaagaggcttcaaagagtaagaaggtcatataaccattaagcttttgcttagaggaaagatgaatataaactttcaaaaacacctaaactatctttaggtgtttttaatatgtaacctttatgaagaaagtggatagcttttttaaaggatattgctatagtgataagtctctttgaaaatagaaatatagttttctttatgaggagtgtttcatcgtaaatataaataacggtgcaatgaatttacacattaataatggaggaagcaagcttatatccacttatataaatcagattattcaaattagttgagcggactctgtttcaaaaaagagaaaattagttgataattataaataaagcaagaatctactctcaagttattatagaaaggagcttataatactgtgaagaatacatttcaagagcacatagaagtcgactgctcctctaaaaagtttaactggtggcatgcagttataaattcgataaatgatggtattctagttatcgacaaaaaagggattgttagatttattaacccagagtatacaaagattacaggagtaaaaagtgatattatcggaaaaccgctaatagaatatcgcccaggtgctcagttaacaaataccctaaaagatcaacaatgcagagtaggcgtatatcgaaaggaaaaaaatcgggaatatatggtggacatggctccaattataatagaaggtaaacttgcaggagccgtatcggtttgtaaaagtctcaatgaagttgataaattatcaaaagagttaagaagacaaacggaaaagctaaagaatttagaaaaccgaatggattctatttatgaagcaaagtatacatttgaacaaataattggtggggacggagggttaaggcacgttgttcatatagctgaaaaagtagcagaatctcaatttcctattcttgtgacgggagaaagcggcacgggaaaagaattattttcacaggctatacataataaaagtgagcgcaagcatggtccttttatacctgtaaattgtgccgctattccttcgtctctgttagaaagtgaactttttggatatggagacggtgcttttacaaatgctaaaaaaggcgggaaggctggactattcgaaatagcagacaacggaactatatttttagatgaaattggagatatgtcgtatgatcttcaggctaagttgttaagagtcctacaagagaaaaagattcgaagggtaggagaagctactgaacgtgcagtggacgtaagaattattgctgctacacatcgcaatctaaagcagcttgtgaataaaaaacagtttcgagaagatttattttatagacttaacgtgattcaattagagatacctcctttaagaaaaagaagagaagatatacgtgaactcgtctattcttttattaaatactcgaccaccaacacttcttacaaaattgacgaatatacactaggttttcttcaatcttatcattggcctggcaacgtaagggaattaaaaaatgtaattgactatgcaacatgcatggcggaagacacagatattgtatttcgtcatctcccagaatttatgattaaaaatgaaaaaaacttttcagatattgtaagtaaaacagagaaatctagtcgaacactgcaagaagctatacaggataaagagtgtgcatttattcaggaaatattaagaaaatatccaaataacattgagggaaaaaagaaagcagcagaagttttagatatttctttagctactttatacaataaaatgaaaaaatatcatattcatttctaagtctttagaaagatttctagattcttagaaatgctgaagactctgtattaagaagtgtatttctttaccaaacagcagttatttctaaaacattagaatttagattaacaaaaacaaagaaagaaagcagctttattggtggcgctttctttttttgttgtgtcttaaatttcttttatcacattttgaaaggatttagtaacggtttgttgctattcttacatatctttggcatgaatcctgcaagaacaaaaagtaccgaagttttttacatctaagatttttgaatctataaatttaaggcaggggggattacatgttagcactattaggatttttaattattggtgtatttctatttttaattatgaccaatcgtttatctgtattgattgccttagttctcgtaccaactgtttttgcgttaataggcggatttgggctagaaatgggagacatgatgttagaaggcattataaaagtagcgcctacaggtattatgattgtttttgcagttttgtacttcggcttaatgattgatacaggcttatttaagcctatgatttctaaaatgcttcgtctagttaaaggagatccgttaaaagtagtcgtagggacagctatcgtcacaatgcttgtatcattagacggagacggtgcatctacttttatgattacaattacagcgctgctacctctttataagagattgaagatgaatcctcttattttatcaggagtggttgctttaggagcaggagttatgaacttagctccttggggaggacctactgctagagctatgactacatttaatgcagattcttctcaattatttaaccctgttattcccgcaatgattgctgggattgtatgggtgttagcatctgcgttttggcttgggaaaaaggagaggcagagactaggagtcattgaactggaagaacatgtacaagggtttacagaacatgcagctgctctagaagcaaaaggaccacggcttttttggtttaatcttgctttaacaattttgcttcttatcgcgttaattaaagtatggctacctttaccgattttatttattgtcgcttttgcaattgctcttttagtgaattatcccaatccagaagagcagcaaaaacgtttactaagccatgcaaacaacgtgttaattgtttctacgatgatttttgctgcaggcattttcacgggtattctgacaggaacaaagatgatagatggaatggcctctgcaatggttagtattatccctgaatcactagcttcttacttacctgtactagtagcggttacaagtatgcctcttagcttagtgtttacaccggatgcttactatttcggagtattaccaattattagccagacggcttctaactttggcatcgatccaattgaaattggcagagcagctattttaggacagatgacgactggatttccattaagtcctttaaccgcctcgacctttatccttgtagggttagcgggagtaaatttaggcgatcatcagcgttttatctttaagtgggcatttggaacgaccattgttatgacgattgtggcattaataacgggagcaattactatttgaggtgataaaaatgataagaatcggatcaggcgcaggtttttcaggagatcgattagacccagccgttatattggctgaaaaaggaaatttagattatttagtattggaatgtttagccgaaagaacaatcgcacttgcccaaaaaagaaaaagtcaaaaccctttaatgggttatgattccttgttagaaaaaagactagagcttcttttacctattattaagaaaaagaaagtgcgaatcattaccaatatgggagcagcaaatccaataggtgctgctgaaaaagttgttgaaatagctaaccgactaaacattaggataaaggtagcagccgtaacgggagatgatgtactaaagttgatagatagaaatggattgactctagaaacaaatgaaccgctatctcattttggtaacgttatatctgcaaacgcttaccttggtgtagaaacaatgttgccagctctagagacagatgctcaagttattattactggtagagtagcagatccgtctttatttgttgctccaatggtacaccactttggatggtctttagacgacgtagataaaattgctcaaggaacagtaattggacacttattggaatgtgggggacaggtagctggtggttattttgctgatcccggaaaaaaagaagtctcaaagcttgccgaattaggttttccatttgctgatgttaaagaagatgggacagccattattactaaagtagaagggacaggaggagtcattaacttagctactgtaaaagaacagcttctttacgaagtaactaaccctcatcaatatgtaacacccgatgttattgcagattttacttccgttcatttacaggaaattaaattgaaccaaattcaagtgtctggtggaacaggtataccaaggcctgaaacgttaaaagtcagcgtaggttacgaagcaggtgttattggagaaggagaaatttcctacgccggatccaatgctctagaaagagctaagctagctagtgaaattttatataagcgtttaaaagataaagtagtcgacttaagaattgattatattggtatttcttctgttcatagagtctcttttcaagaatcagctccttatgaaattaggctgagagtagcagggaaatgtcttacttcaaaggaagcagctaaaattggagaagaggtagaagctctttatacaaatggacccgcaggcggaggcggagcaagaaagtatgttaatgaagtagtaggaattatttctacgttgatttcacgtaacaaaatagaaacacaccttacattgaaggagagcttaacaaatgaaaaagaaattatatgaacttgctcacagtcgagctggagataagggaaacacgcttatgttatcactaattccatataacgaaaaagattatttcttattacgtgaaaaagtgactgcttcggaagtaaaaaaacacttaaaaaatattgtagaaggagacattgttcgctacgaagttcctaatatatcagcatttcaatttgtatgtcaccgcgcgttacttggtggggtcactacttctttaggaatggatacgcacggaaagagcttaagttatgccctgctggaaatggaagtagacatttgaataatagtataaaggaggtactttatcagtgaacaatacgtcaatacaaaaagttctaagctttattactgtaggagttcttattctagctttccttcctttcaatattcttgcagcaaaagaagaaaataattatagaaacgtaaaaaaaccaacctcttcagttttatcaggtacctattatttggagcagaaggttgaattaaagacaaacacgccaggtgcggaaacttactatacacttgacgggagcactccgactactaaaagcactcagtatacaaacccgattattattaataacgatacggtgcttaaagcaatttccataagaggaaacgcgaaaaataaaaatcaaaagaatcatagtaatctagctatatttacttattcatttgaaagtagagaatctatagctactcaatttttatcattcacttataaaacaatgccctaccgactttatgtgcctaaagactatgattctacaaaatcatatcccttggtgctattcttacatggaggtggtgaacgaggaaatgataatacaaaacagcttcttggcaacgacggggctatcgtttgggcttcaccagaaaatcaacgaaagcatcccgcttttattttagctcctcaagctcgtaatgtaccaagcggaggcttcaccgttacaagagacgataacaacaaagtcgacttagcaaaagtgttccaaacatcagaagatttaaaaacggcttatgaaattttacaaagtgtaagaaaatcctacaatatagatcgtaatcgcctttattctacaggattatctcagggaggatttggcacatttaacttaaatatagaacaccctgatttgtttgctgctatggtgccgatagcgggaggagccaatccagctaaagcgcactttcttatcaacaaaccaatatgggcatttcatgctgaagacgattctatcattcctgtggcctattcaaggaatataataagtgctataaaaaaatctggagggcatccgctatatacggaatatcctaaagagttagagtatgatcatgcttcgtgggtttctgcgtatcaaaatcagaaaatgattgattggatgtttcagcaggtgaagcaaacaaattagtaaaaaataaagctcgatacttcattattcctaaaaagctcttccagttaataagaactggaagagctttttgcttttataagaatctacccgctaggagcaaggcatttcacaccacatttaaccaaatatgtgacgaaatgatggtaaagccatttaaaatagataaaaatcgcttcaagtgtgataaatatcacaccttttaaacatacaacatgataattttttagaagtaagcaatatgtcatgacaaacttcaatatgttaggaggtttttagccttttgatctgttgagatgcatctttaatatgaacgtttatataccattattatgtacagagatttagaggaagggagcctgagcttaggtgagaaagcaaaaatcaatgcatattagcaagttaatcattctctccgtattcattacaatttttttagcaggatgtgatagtcgttatttgattttaaatccgcagggggcggtggctcaaaaagaataccagttaattattttttccataattttatgcacaattgtcgttattcctgttttaggtctgcttgtgtatatcgttttacgctaccgtgataagcctggaaacaaggctctgtatcggccagactgggacgatagcaagcgtcttgaatttatttggtggggcatccccattattattatcggcattttaggttttgctacggccaagacgacgtatgacttagtagatccgccgaaaaaagatgtaaagccgctaacaattgaagtaacatctcttgattggaaatggttatttcaatatccggatcaagatattgcgacagtcaactatgtagaaattccaaaaggtgtgcctgttcaattcgtgctaacgtcagatgcacctatgaattctttttgggtacctcagctgggaggacaattatataccatgccgggaatggcaatggggctgtggctgcaagctgatcacaagggagaatactttggttcgggtgctaattttacgggtgaagggttcgctcatatgaactttaaagttaaatctacatcgacaaaagaatttaatcaatgggtaaagcaagtgaaagaaacatcaccagctttaacaaaagctgattatagcaaccttgcccaacaaggtctttctctagaaaaatcgtattctaccattcctaaaggcttattccaagaaattgtcattaaaaacggcggtcaatattatagtcagcatcatcatatgaaaaatgaagacatgaagattatgaatgtggcttctgaaaaacaagtacatgcacagcacgagcaccaggaaggaggaaactaagttgttagacaaattaaaagattttttatctcatttttttgtgacaggggagccgatgatttacggagccgatgtcgccattttgttaacactagccggtattatttttgttcttacttatcttaaaaagtggaagtggctatggcgtgagtggctcacaacggtggatcataagaaaattggaatcatgtatatgctttcttcattgttaatgctgtttcgaggcggagtagatgcattattaatgcgtatgcagctagcgtttccccagtggcattttctagattctaatcattacaacgaaattttcactacgcacggaaccattatgattctatttatggcaatgccgcttatgtttgcgttctttaatattgttgtgccgcttcaaattggagcaagagatgtcgcctatccttttttaaacgcggtaagcttttggctatttttctttggcgccatgcttttcaatttgtcgtttgtaatcggaggctcgccagatgcagggtggctaagttatccgccgctttctggcatgcagttcagtcctggaccaggtcaagatttttatatttggggcattcaaatatcaggtattggcagcttggcttctggaattaatttcattatgaccattttaaaaatgcgtgcgcccggtatgaaacttatgcatatgccgctattcacgtggtccgttctagcaagctgtattattatcattttcgcgtttcctgtattaactgtaacgcttgctttattgtttattgaccggttctttgacggacacttatttaccatgaccggcggaggaaatccaatgatgtacattaacttaatttggatgtggggacatcctgaagtgtatatcgttgtacttcctgcattcggcattttttctgaaatcgttgcaacgttttctcaaaagaagatatttggctataagtctatggttttttcaatgatgattattagcgttctatcgtatttcacatgggtacatcatttctttacgatgggtgcaggtgctaatgtgaatgtgttttttgctattacgacgatggctatcggaattccaacgggcgttaaagtgttcaactggttatttacgatgttccgcggccgtattcaaatgacgcagccaatgctatggacaattgcttttatcccgtgctttgttgtgggaggagcaacgggtgttatgctttcagcagctcccgcggactatcagtatcataatagctactttttagttgcacactttcaccaagtgttaatcggaggcgttgtattcggcttttttgcaggtttgtactattggtggccaaaaatgtttggctttaaactagatgaccgtcttggtaaatgggcgttttggacgtggaatattggtttttacgtatgcttcatgcctcaatacgcattagggtttatgggaatgacgcgccgtatttatacgtacgactttgacatgggatggggaccgctgaacgttatctctacagtcggagctttctttatgggcatagggtttatctttcaagcatggcagattcttcatggcattaagtacggagaacgagatgtaacaggggatccttggaatggacgtacattagaatggtccatcccttcaccgccgccgcactacaattttgcagtgattccaacagtaacggggcaagatgcgtggtggacaataaaaaaagaaagaaaaaagaaaaaagcgaaggaaacagctactttctctccgattcatatgcctaagaattcaggtattccatttatcatgtcggttttctggttcattgctggttttggcttaacgttccactgggtgtggatggcgatattcggtttgacaggagtcggagcttgtttactagctcgttcttttcaatacaactcggactattatattccggtggatgaaattcgacatacagaagattcagtagggagggttggctgacatggcatatgcgacagcgcaccacgaagaacatcatgatgaacatgatgaaggaatcaaagttatgggtttttggcttttcctcgtaacggactgcatcttatttggagcattatttgctacgtatgccgttcttgttaatcatactgcgggaggccttacaggaaaggaattttttgaagttccaggatttgtttctgaaacgtttatcttattaacgagcagctttacgagcggattagctgtgctgagcatgcacaagggaaaaataaagcctttaattggctggctaatcgtaactctgcttttaggtatgtgctttgttggccttgaaattcatgaatttcaaacaatggttcatgaaggagcaaccatttccatcagcgcattttttacagctttctatacgctggttagtacgcacgggctgcacgtttctgtcggcatcatttggatgatttcaattacgatccaattaaaacgatacggaattacctctgtaacaaagcgaaaagtgacgattatcagcttatactggcattttcttgatgccgtctggatcttcctttacacggttgtgtatttaatgggggtgatgtagatggagaaccacgggtcgttaaaagcttatacaataggatttattttctcgattattttaaccgttattcctctgctgctggtattaaaccacgtactggctaaaaatatattactagctagcattctaggaatggccgtgcttcaattttttgttcaattgtttttctttatgcatattaaagacggagaaaagccccgttataatgtgatggctttaatactcggaatcgtttttgttattacaattgtagcaggatctatttggatcatgacttttaactctcaagttcaataaaaatggagccgtgtacgatgtgcacggctctattttttattaatccctctacattgtgataaaaatcacatattttcgcttgcgcaagaagtacaataaaagtgtagcaaagaaagttctttataaacgaaagacaaaggagagattatgatgaatatggcttatcgtaacatcctcgtagcagtagacggttctgtagaagcggagtgggcattcaaaaaagcagttaacagtgcgaaaaaaaataacgctcatttgataatttgtcacgttatcgatatacaggcgctaagtccatcaccttatgcattctatacggatacacgctttcaagacgcagagaaatttgctgaagaacttttaaccaactatagtaacctagccattaaggctggagtaacgaaagtcgaaacattaattgaacatggttctcctaaaacaaaaatatctaaaaaaattgctcccgataagcacgttgatttaattgtatgcggtgcaacggggttaaacgcagtagagcgcattttaattggaagcgtatctcagcatattttacgctatgccaaatgtgatgtgttaatcgttcgcactcctaaagaagccgaagaagaatcaaagcctttacaagtggaactaacagagtagcgggcacagacgagaaagaaagatcattgttcacagcaaaatacaaagctctcaccatttatttaaagaggggggataaatgtattttagttgaaagaagatccgaacgaggaatcgagattcttaatagagaattcgactcgttcggatttttttattgtgatggtaaacgtaggtttcacgtatgcagctgtttttagctgttgattgaagggaaaaggtaatgaaagaaaagtgaggataatagacatcaagcatgtttactaaagaagaggacgggaagaacaagtatatagaaaactttcccttagttggttaaggattcattaataaaggagtgacgaatatgtcaaaactaaataatccattaactcaatatttccatgaagactatccaaagcagtatcaagaaccgcctggtgtacaaaaagaaatgaacgtcatcccggactgcggggagaacagttacataggtgcaggtaaattaaaaggcagaaaagctcttgtgacaggcggagattcaggtattggccgagcagcagctatcgcttacgcaagagaaggagcggacgttgcgcttaattacttgccacaagagcaagcggatgcagaagaagtaaaaaagcttattgaagcagaaggaagaaaagcagtactcatacctggtgatgtaggcgaagaatctttttgcaaggagctagtagaaaaagcttataaagaattagatggattagacgttttagcactcgtagcaggtaaacagcaggcagtagaagatcttgctgatttagaaacggaccagctgcgcaaaacctttgaagtaaatgtattctctttatattggaccgtaaaagcagcgctgccttatttaccagcaggtgcttcgattattaccacaagttctgtacaaggctatagcccaagtcctaatctattagattatgcagctacaaagtttgccattaacggattcactcgcggactagccaagcaactagctccaaaaggtattcgcgtcaactcagttgctccaggacctatctggacgccgctgcaaatttctggagggcagccaagcgatgctattccaggctttggacaagatacacctctacagcgtgctggtcagccggtagagttagcaaatgtatacgtatttttagcttcaacggatgcaagctatgtaacagctcaagtttacggaattacaggcggaatagaactagcttaactcaaaaaaacacgtgcagttatgaactgcacgtgttttttttgagttatttctgttttaatgtcttcttccttttaaagtctgtacacaaatgtagctaagggtagcgaataacgctgtaataaatgccgagtgagacagtgtagcaaagacatttaaacgagacatgacaacaaatataccgctgaatatttgagcaatggttaaagcaaccgcaatgatggacgcgtagtaaatatcacggcgagtttctttatactgcttgatggcagataccataatccaaatgataagaacaaacagcacaagagcagcaaatcggtgggcaaaatgaatgcccgttgttcctgaaagctttggaataagagtattgccgtaacaagcaggaaagcttgtacacgctaagcttgcacctttgtgacgcacatatgcacctaaataaatatcgcagtaggtaaatataagcgtaaaccatgcgagccatctaaatttgcctgtaaccgctcctttaataaaatgatccgaacgatccttttgaataacaaatattgaaagtaaaaatacaccggtaaacgcaataagcgaaagaccgaaatgcagtgctagcgcctcagctgactgaggccagataactgcagaagccccgagcaatgactcgataatgataaatgcaatactcataatcgctaaaattttcacttcacggtttctgcgataacgaatccaagcccaaatagaaaatgctaaaacaagaagacctgcaaatgcggtaatcaaacgatgcgtatattcaatcattgttgctactgcgtattcaggtattaactgcccgttacacaatggccactcgtttccgcaccctaatccagatcctgtggttgtgaccagactgccggcaatcattaaaataaacataacaatcgttgtaaatatagctgttattttaaataaatttctcatacgttgactccctttgttgagttactaattatgactatagatttgatgaatacgatagtcaagtagtagagcgtaattaacaaataactgtcacaaactcgcacatgtttcccttaaatttgatgtcagaaaagctttctttactaaactttttaatggttttttccttttaaacaatgtaaatatgctttcatacataagatataaaaaattatattagtgattttatacaatttgcaaaaaaaactttagagagaatggagatacaatcatattccaaaagtgataatataaatataaatcaaccgatgttataaaacctatcattttatgttagatatataatgagctttttagcacagagaaactttattgaaaggagagataacgatgagcttagaagctttaaataaaagagtagaaaccgatctttcttacctttccttcaggaaactaacagaagtacagccaattatccctaagagcggacacgtatacgatgtaatcattattggaggaggtcaaagcggtttaggaacggcctttgggttactgcgagaacgcgtgtcaaacattcttgttattgatgaaaaccgttcgggtttagaaggtccgtgggaaacgtatgcacgaatgattacgctgagaacaccaaaaaacttaacgtctattgatttaggtataccttcgcttacgtttcaagcgtggtgggaagcacaatttggctcagagggctgggaagctcttgacaaaattccaagaggagattggatgaattatttgcgctggtaccggagcattcttaaccttcctgtggcaaatgaaataaaattaacgttaattgagccgacggaaacaggtattcatcgcttgcatattgaagggaatggagcttcatgtcctacactgatggcacgtaaagttatactagctacaggaattcaaggaggaggagagtggcatgtcccgcctatgatttctgaaaaattgccgcctcatctttattctcacacttcccaaaccattgattttactacgttgaagaacaaagaagtagctgttttaggaggaggagcttccgcctttgacaatgccaactatgcgctttctgaaggggttgctgaagctcatgtatttgttcgccgaaaagaacttccgcgtattaacccaatcagacaaatggaagcttcaggaatgattgaacgtttccatgctttgtcagatgctgaaaaatatgaagtgatggctcattttttcgaatacaaccagccgcctacgaatgatacatttggacgcgcttcctcatggccaggttttcatttacacgtacatgcaccgtggctggatgtcgaagaaaaacaggacaaagcagttgtaacaactcctcagggaatctttacatttgactatttaattattagcacagggcttctaactgatccggctcttcgtccagaattacgccttgttgaaaaacacatcgcccgctggagcgatcattacaaagcaccgcatgaaattgccaacccagtattggacgcccatccttaccttagtaacggctttgcttttttaagtcgtaatagggaaggtcaaaaaatggtatatggcctttttgcttttaattattccgctttaattagctgtggaatttctgcatccgctctttcagggctaaaatatgcgataccaaagctcgtctcagaagtcgccaatcagctttttattgataatcgccatgagaatttaactaatttctttgactatgatgagccggaatttatcggcagctggtcaaaggacaataatcaagtgaaaacaatatagcaaaacacatttttaacaatgaaaaaggtgaagcatatggagccgatctctaaaaagaagatagctactttgtatactcaaattagccaagagatttttaatgtaggtgtgaatactcaaaaaatagatattattgataataaaattcttattctagctcaatcaaaaagaatgccggcactagaagcccttagtgaagaatatagagaattagtgatgtctcttgatgccgctttgtcgactaaatataaaaaaatgctaaagcaaaaagtggagcttttatttgatatcgaggtcacttctttatttagagattatgatcctgttacagagaattcttgtacagttatttgctttaaatagcttctctatataaatggcaaaacgttcgatgaaatcgtttgtttcgcaaaacacgtaaaagacggatgcttatcttctgtttacagaagcaaagagccgtgaagatagaagggtttccttctgttttcacggctctttttatagatattttcataaaaaaggagtggaaaaatggctacatatacacttgttaataaaggggctgtaaaaactagttaaaaaaatccaatcgatcattaaaggagtgaaaagcaagtggcgataaatgaaaaaggtgaaactcagcatatggaactaataaaaaaatcagcacctaacccttcatggttggataagctgtttcatttaaccgaacgcaaaacagatgtaaaaacagaaattcttgctggaattactacttttgtgacgatgagctatattatctttgttaatccgacgattttagcagacgcaggcattccaaaagaagcggcaattgcagcgacgatttttgccactgtctttgctactcttttgtttgcattatgggcgaacatgcctattgcagtagcaccaggaatggggcttaacgctttttttacgtatacagtggtattgggtgaagggctaacgtggcaaacaggtttaggagccgtatttatttcaggggttgtattttttattttaacgataacaggcttacgcaagaagattattgaagggatacccgctattttaaaaagtgctatttctgttggaatcggtctatttattgcttttatcggttttaagcaagcaggcattattgtaagcaacaaagaaaatttagtagctcttggtcagcttacaaaaccgggcccattccttgctttattaggttttatggcggtaactgtattaactgctcgaaaaattaaaggagctgccctgattagcattttgctagtatcaattgcggggatggtgctgggcatagtagaagcacctaaaagcatcagcagcgttgtgtcattttcaatgccgagcatgtcagaaacttttttacaaatggatattaaatctgctctccattacggtcttttctctattattttttcatttacgcttgtggagctattcgataatttaggatcgatgattggattatctaaaaaagctggattaatggatgaaaaaggagaaattaaggggttagataaagcgcttgtggcagattctcttgcgactgtagccagtgctgctatggggtctactgcaatgaacgcatatgtagaaaacgctgcgggaattgcagaaggaggcaaaacgggccttaaagcactggtcgttgccatattgtttttagtgagtcttttatttacgccattaattagtattattccttcttttgctacagcgcctattttaattatggttggagctctcatgttgacagaaataaaaaacattcctctagacgagataacagatgctgtgcctgctttttgtactattagtttgatgccgttaacgtttagtatcggcgaaggcttagcgctagggtttttatcttatacattcgttaaattgttagccggcagggcgaaggaaattcactggattatgtatatgattagcgccgcttttattatcaacttcgtttgggctgcttgagcgcatatatctagagcaaaaaagacttctcagctgagaagtctttttactgttcatgtaaattttaattgctcttttcttacaagaataaaaggtagcgaagaaagatatataacgttgaaatcaaaagagatacaagcataattggagctccaattttcaaaaaatccataaacgaaaatttatgtcctttttttacagccatgccagctacaatgacgttggcagatgctccaattaacgtaccgtttcctcccaaacatgctcctagagccaatgaccaccatagtacattgatttgagcagaatcagggctcattcccattccatgagccatatcttgaataagtggaatcattgtagcaacaaaaggaatgttatcaataacagctgaagcaattccgctaatccacaaaatcagataagctgacagtgcgatattgccgtctgtaacgtttaacgcgccagcagccagctttttaataatgcctacatcaattaagcctccgacaagaacaaacaaacctgcaaagaaaataatcgttgtccattcaacagaatcaaatgcgctttctacttcatcatgagttcttaatccaattaccagtagtacagcagcacccgtaatggctaccatagccgcatcaatgtgcaaaacagaatgcagggtaaaacctagaatcgttaatactaatacagttaacgattttttcattaaaacagaatcttgaatataatctttttcatttaaactcattagctcttgctttttactatcttctacttttaactttttacgatagataagaacaagaatccccagtgtaacaacaccgataatcagcactgcaggagttaaatttaataaaaaagcattaaaatcaaggtgagggttcgctgccccaatcatgatattaggcgggtcgcctattaaagttgccgttcctccaatatttgaaaacagcacttctgatataagaaacggaaaaggattaatgtttaagatagtagtaatcgaaaatgtaacgggaacaattaataacacggttgtcacattgtctaaaaaagctgatccgacgcctgttaaaatcgataaaataactagaattcgaaccggatcacctttagcaattttagcagacttgatggctgcgtattgaaacacgcctgttttatttgtgatgccgactaaaatcatcatacccataagaaggacaattgtttcccactgaatgtgttcggtaatagcgttattaaaatcgacaatgcctaacaaaatcattaatatagcacctaaaagagctgctgaagcgcgattgatcttttcagtcataatcagaaaatatgtaatgataaatataataatggctgcgtatacatggaaacttgtaatgtgttgaattgcattgtgcataactgtaacctggcgatatgtcatctagacgtcgcgaagtgtagatgacgcaaactttggatgttttccaggttttcacctcatctttcatcgtttaatttacatccaactttatggtgaaacttctataaaatccgctttcctttaaccaacctcctttaaaagctttggtgttcttcaaaatgaagacgattccttcagcattatatcatatttacataaaagctttcttgctaattattcatgtgattttcaacccacacgcttattatgcaccttaaattcagtttacataattgattcctctaagatgggacaaagttagacaaagttggaacagtgtccaattttgtctaactttgtgagagcaaataaaacaatggattgctaagataaagcggttttcatgttggcacggtacttgcaagagtaattaagtgaagtttgataatcaaatgaggaggcttaccataatgaaaactgctcaaaataaaacagaaaagcttacgaaagaaaaagccagctggatgtatcagaaaatggtagaaattcgaaagtttgaagatgaagtacatcaaatttttgcaaaaggtgtactgcctggttttgttcatctgtatgcaggtgaagaagcgatagcggttggaatgtgcgctcaccttaatgacaatgacagtattacgagcactcatcgtggacacggtcattgtattgctaaaggcggcgatttggatgggatgatggctgaactatttgggaaggtaaccgggttaggcaaaggaaaaggcggatctatgcatatcgcggatttagataaaggaattttaggagcaaatggaattgtaggaggaggatttccgcttgcatgcggttctgctttaactgctaagtataaaaagacaaaagatgtaagcgtttgcttttttggagacggagcgggcaatgaagggacgtttcatgaaggaattaacttagcagccatttggaaactgcctgttgtttttgttgctgagaataatggctacggagaggcaactccattttcttatgcttcaagctgcagcacgattgcagaccgtgccgcagcttacaacattccaggcgtacgagtggatggaaaagacgtgatggctgtttatgaagcagctgcagaagctattcaacgagctcgcagaggggaaggcccaacgttaattgaatgtgtaacgtatcgaaattacgggcatttcgaaggagacgcacaaacgtataaatcaggcagtgaaaagaaagaacatctccaagaaaaagatgctattgctctttttgaaaactatttgctttcagaacaagtagtaacagaaaaagagctcagagatattgaaggtgatgtagaaaaagcagtaaaacgcgcggttgagctagcagaaacaagcgattatcctgatgcttccgaactattaacagatgtttatgtatcttactaattaaagggggaaaagaagatgactagaaaattaagcatgtctgaagctatcaatgaagcaatgaaactagcgatgcgaaaagatgagaatgtgattctgctgggagaagatgtagctggcggagcggaaattgaccacctgcaagatgatgaggcgtggggcggggtccttggggtgacaaaggggcttgtgcaagaatttggacgtgaacgaattcttgatacgcctatttcagaagcagcttatataggagctgcaatgggagcggcagctacggggttaagaccggttgcagaattaatgtttaatgattttattggatgctgcttagatcaagtgctgaatcaaggcgcaaaatttagatacatgttcggaggaaaagcagaagtgcctgttacaattcgaacgactcatggagctggatttagagctgcagctcagcattctcagagcttgtacgctttgttcactagcattcctggcattaaagtagtggtcccttctaatccttacgatgcaaaaggtttattattagcagcaattgaagacaatgatccggttatcttttttgaagacaaaacattgtacaacatgaaaggtgaggttcctgaaggctactatacgattccattaggaaaagcggacgtgaaacgcgaaggaacggatttaactattgtagcgattggcaaacaagtaaatactgcacttacagcagcagatcaattatctcacaaaggaattgacgtagaagtagtcgatccgcgaagtctatccccttttgacgaagagacgattctttcttctgtagaaaaaacgaatcgattaattgttattgacgaagccaacccaagatgcagcatagcaacagacattgctgcgctagttgctgataaaggatttgacatgcttgatgcacctattaaacgaattacagcgccacatacacctgtgccattttcacctccattagaagatatttatctgccaacaccgcaaaaagtaattgaagttgtatcggagttactaggagataaatcgcttttaagcgtgtaagtaaagagaaagggggaggaagcaaatggctgcagaggttgtaatgccgaaactaggtatggcaatgaaagaaggaaccgtttcgacatggaataaaaaagttggagactccgtttcaaaaggagatatgattgcaagcattaattctgaaaaaatagaaatggaaattgaagctccgcaggacggtgtgattcttgatattcttgtgcaagaagatgtaggggtgcctcctggaacgattatctgttatgttggaaagccaaacgagcagcttactgagcaaaacagttcagcaaatgagctccaggctcccaaaaacgaagtagctgccactatttctttagaagagccgccagcaaacgcagcttcatcaaagaagagcaaagaaacggtgcttatttcaccaattgcacggaaaatagcagaatctgaaaaccttaatgttgaaacgattaaaggcacaggaccaaaaggaagaatcaccaaagcagatgtagagaaagtgctggcggaaagagcttcagaagcgagtcgtccaccagcagaaatagataaagctataaaaaaagaaacgcttccagtagcgggcatgagaaaagtcattgcaagtcgaatgcataatagtttattaaacagtgcccaattaacgattaatatgaaagctgacgtgacggatttgctgtctctgcaacgggaaatcaaagatttgatccaacaacgccataaggtgaagatatctctaactgattttattgctcgcgctgttgttctttcacttcaagaacataaacaaatgaacagtgcttatatagataacgaaattcatctctataaccatgttcatcttggaatggccgtagccttagagaatgggttagtagtccctgttgtgcaacatgctgaaaagatgtcgttagttgaattagctgcagagatcaaaacacgagcagcagatgctcggcaaggtcaactgagcactgataggatgcaaggttcaacattcactattactaatctgggtgcttacggagtagagtattttacacctgtattaaatccgcctgaaacaggaatccttggtgttggagctactgaagatgtaccgatgtataaaggagacaatttacaaagaagaaacgtgctgcctttaagcctgacgtttgatcatcgcgtactggacggggcacctgcagctaatttccttggaactattaaacaatacttagagcaacctattttactactcttatagaaagttggtgcattccgtgaaacctttagttgtcattggcggcggtcctgcaggatatgtggcggcaatcactgccgcccggcaaggaaaacaagttacgttaatcgaacaaaaagatttaggtggcacctgtttaaatgagggctgcatgccaacaaagtcattattagcaagcgcggaagcctacgagaaaatcaagcaagctgagcaattcggcatcaatcttcctttagaacaagtgaaaattaactgggatggcgttcagcatcataaaacaaccattgttaaaaacttggtcaagggaatcagctatttgatgaaaaagaacagtattaaagtcataaaaggagaagcttcttttttgacaaatcattgtctagccgtgcgaaacgaaaatcacgtagaagagatagaggctgaacagtttattattgctgcgggttcagaacctgctagcctgccatttgctccttttgatggaaagtggatcattcacagtaaacaagcaatgtcgctgcctgctatcccttcatctcttttaatagtaggagggggtgtaattggatgtgaatttgcaagcatttacagccaaatgggaacaaaagtaacgattgtggaagcggcagatcagctgcttcctggtgaagatgccgacatcgcatttacgttacaggaagaattagagaaaaaaggcgtggcaatttatacatcctcttcgttaacagaaatgcagccaaaagataaaacagctctatttaaacacaaagaagagctgcatgaactgcaggctgagtatgcattaatttcaattggaagaaaacctagagtgctaggtttgggtttagaacaggttggcgtacatttttcaaaacaaggaattgatgttaatgagcatatgcaaacgaatatacctaatatctatgcttgtggagatgtagttggcggaattcagcttgctcatgtcgcctttcatgaaggcacagttgctgctttgcacgcatgcggaaaagataagagcgtaaattatcgagctgtaccccgctgcatttatactcaccctgagattgcaagtgtcggtatgacagaaaagcaggctcgaagcgaatacggcgatattcgcgtcggagaattctcgtttacggcaaatggtaaagcaatgattgcaaatgagtccgttggaaaagtgaaagtaatcgtagaaccgcagtttaatgaaattattgggctttccattgtaggttcatatgctacagaattaattggacaaggaaccattatgatgcacggagagctgaccacagatataatggaagactttatcgctgcccaccctacattatctgaagccattcacgaagctcttttgcagtcggcgggtcaggccgttcactcctgattacgcaggtgcccaagttattaaactctttgaggatgaaaagtaaaaatgaatgattcaaaaagataactagaggatgaaggaatcacggaagcggtatagtagttttcctgcatcctcgtctagtttctttattaatttttacataacgtgagtttaaaaatctatcatttggtaatgataacgttttctttgtgatttataataatggtaacaagccttgatttactatattcaattaagtttataggggagaggtcagaaatggaatccacactttctttaaacacatggaaacgttttgtaaacgaaggagcacttgaatcttcaagattaaacgacattattgtaaagtcatggcatcgttgtaaaagcgcagatgttaatccttacctagataaaggcagatcgattttaagaaatgaagactttcattctcgaaaacaaatgaactctttatttcttgagacggctttgccacacttagaaagaatcagacaatcagcggcggacttaggaatggttgctttattaattgacccagaaggctatattttatctattacaggaaatagacttacactgaatgaagcaaggaaaattaattttgtggaaggtgcctgttggacagaaaaagaagtaggcacaaatgcaatcggtacggctctgcaaacggaagagcctattatgataacgggtacagaacattattcgattgcttcgcatcaatggagctgttcggcagcgcctgttcgaaatgacgacggaaatttaattgggattattaatatttcttgtcctgtaaacagagctcacccttatacacttgggatggttacgtccattgcgtatacaattgagcgggagttaagcattcgaatgcacaaagacgaaattgagttggttcacgcttctatgaattttgttgatagcaaacagctcttgttgctttgcaattacaaagaagtgattgtgggagcaagcaaaaccgtgcgagaatgtataccaaaatggtcaggtctgcagttaaatacgattgtacaacagggatttcgtatagtgatggaagtgcctgtaacctcaaaaagacacggtcattctattggaaagattatttatttatcagaagaagcgcaccacaaccaaacaactacacagatccctgctcaatcattttcttttaaaggagaagcaggcataagccgttcctttcagcaaacactagaagaaataaagcatgcggctcctacggatacaactgtctatattttaggggaaacaggtaccggaaaagaagtaatagctcaaacaattcatgaaaacagctcgcgtaaaaacgggccttttattgctcttaattgtggtgctattccgaaagaacttatggaaagtgaattatttggctatgtggatggagcatttacaggagcacggcgtcaaggatatcaaggaaagtttgagctggctaatcacggtacgatttttcttgatgaaataggtgaacttcctcattctatgcaagtttctttgttaagagtattgcaagagcgcaaggtaacgcctgttggaagtaatcaggaaattccggtagacatccggattattaccgctactcatcgagatcttcgtcaacttgtcagtgaagggaagtttcgagaagatttatattaccggctccacgtgtatcccgtgcatgttccgcctttgcgagaaaggaaagaagatattccacatctgatgcgctacttttgtcaaaagaatgcttggaatatgaatttccccaaggaattagtagataaattaatagattatcagtggcccggcaatattcgagaattatttaatgtacttgaacgcttgaagatctcgcttaaaacagaagcagaaaaagagaagatattgaattatttgagttctttaaatcttggtggccaaaagaacatctctaactctgatacttcacaagaaatagaagacaatgattttacgtccctccccgtactcacatttcgtgaaaaagttcaaaaagacttaatgatggatgctttacgtaaaacacagggaaatgtgtcacttgccgctaagctgttagatataccaagaagtacattttataacagattaaaaaaattcaatttgtaagctgagagttcgtagctgttttaaatttttaaataaggataggagctgagtagaatgaaagcattaagatggcatggcgttaaagatgtaaggttagaacatattgcagaacctactgtctctcaaggaaaagtgaaaattaaagtagaatggtgtggaatttgcggaagtgatttgcatgagtacacggcaggacccatttttattcctacagaagaactccatccattaagcaaagataaagcgccggtggtactggggcatgaattttctggacaagttgtagaaattggagaaggtattacgaatgtaaaagtcggagacagagtagtggtagaacctatctatgcatgcggagagtgtgaaaactgtaaacaaggaaagtataatctttgtaataaaatggggttttatggtcttgccggaggtggcggaggtttttctgagtatgcctccataccggtagaaatgattcataaaataccggaagcggtgtcttacgagcaaggagctctcgtagagccttcagctgtggctcttcatgctgtgcgtcaaagcaaactaaaggtaggagataaagccgccgtatttgggacggggccaatcggtttgctagttattgaagcgttaaaagcctcgggtgcatctgaaatttatgcgatcgaactatcggaacagcgcagacagaaagctgaagaacttggggcgattgccattaacccgcaagaatacgaccccgtagcagaagtacataagcgcacaggcggaggtgtagacgtttcctatgaagtgacaagtgttcccttagttttaactcaagctattaattctaccaaaagtggcggggagacaatgattgttagcatatttgaaaaagaagcgtccattcatccccaaacaatcgttttacaagagcgtacagtaacaggtattattggctaccgcgatgtatttccagcggttattagtttaatggcaaaaggctatttttctgctgataaactggtgacaaaacgtatcaagctagagaatgtaattgaagaaggttttgagacattgttaaaagaaaaagaacaggtgaaaattttggtgaaagctgaataaaaaaagaggctgggacaaaaatattttagacgaagtaaaaaacgaaccattgatcaaaatttttgattattggttcgtttttttgttaacatgaacatatgttcggtttgtttaggtctttctagcagttgattggagggcaagacaaggactcctgcgggaaaagcggaacaaatgagaccctacaggagcgtatgcgacgaggtggctcagcgcccgcgtaaagcgaagtcttgcacggaaatcaactgccgtgtcataagcggttcagctcatctatcatctatcctatttgttcgtctttagattggattcatttcgttatgtcttaacctctttaaattgaataaggtaagtatggttattttattatcagattattctgtactatatacagtatattgtatacaatatataatctaatcattatctaattaataaaatcagaggtgatgagtgaatgacagacaaacagtttaaaaatgtacaagacggaacaaaagcggtatgggcaggagaaaaagaatcccttgcttacaatgccactcaagttcccgtcgtcttcagcgtagcttacaattatgatgatgtagacgaatggcaagaagttgctttaggaaacaaaccaggctatacgtataatcgcatgagtaatcctacagttaaagcttttgaagaaaaagtaaggatacttgaagaagcagaagaagcggtcgcattttcctccggcatggcggctattagcagcacattatacacgtttttaaaacctggagaccgcgtcgtatcggtaaaagatacatatggaggaacaaataaaatcttcactgagttccttcctaacatcggagttgatgtaaccttatgcaatacgggaaatcatgaagaaattgaagcggaagtaaataaagggtgtaaagtgctatatttagagtcacctacaaatcctacgatgaaaattattgatattgaaagaatagcaaaagcaggaaaatctgcaggggcagtcgtcattattgataatacgtttgcaacacccattaatcaaaatcctcttcaattaggggtagatcttgtcattcacagcgcaacaaaatttttaagcggacatgcggatgccttaggagggacagtatgcggctctaaagaattaatgaagcatgtgtatcactaccgtgagatcaatggcgcgaccatggatcccatgtcagcgtatcttattttaagaggaatgaaaacgttaaaattacgtatacgtcaacaagagcaaagcgctttggaaattgctaaatttcttcaaaagaaagaagcggttgaagccgtctattatcctggattggaaacacaccctcatcatcatattgccaaaaaacaaatgaaaggctttggcggaatattaagctttgttttaaaaggagaaatggaagctattaaaattttgctgccagagttaacgtatgcaaataaagccggcaatttaggagcggttgaaacaatttatggaccagcaagaacgactagccacgtagaatgtacgcttgaagaacgtaaagctcttggaatatccgaaggactggttcgcatatctgtaggaattgaagatacggaagatttaattgcagacttagaacaagcatttgctcacttggaatccgcatcatctattagtaagtaaaaagacacgtattactttttttaatgaaaataaagtaagtacctctttttagttggtagacacttcttcagaattgtagaaattttgtggaataaagctgataaattaaactgtacgtgtattttttcgtctgattttgtaggtatactgataaattagatgaaataaaaatgtttttacgcgttttaaaaataaactaacttacaacagcctacaaataaggaatgatagtatgtcgaaacaagaacaagaaagtgaatacacaataaaagatgcatcattgtttggattcaaattaatgcaggtaagtaaagccatctggagagctgcggaagatgactgggagcaatgggtgaaaccttatggactaaacgtaaatgagcatcatattttatgtttagctagtaacacgggagaaatctctatgtcagagttagctaatttaggagctatgcatatctctacagcgtttaatttttcgaaaaaattagaaaatcaagggtatctgcacttgtccaaaagagaaaatgataaaagaaacacctacatcaaattgactgaaaggggcgaacaattattgcttgatacgctcaaagggtatgaaccacataacagtaagatatgtaaaggtgcacttcctttaaaaacgttatacggcaaattccccgcttttccagagctagtaaccgttgttcgccatgcttgcggcggcgagcttgtgaccgttgctgatcaaccttttgtgaatataaaagaagcggaaatagaagaaaatgaagataagaaagaagtccagctaactagtaattgaacgcggtgaataatatgcagacaatagggcttcatgaaaataagtgaataacaggcggagctgttttatacgtgagaaatacgacgtataaaacagctcttttttattttccgtgctttatttgtaaaagatgcagcggatattatgatggaaaacggctggatggaaacaccaccggaagcggtagatagaaagcatttaaactccaactaattaaataatttgcctttatatttgatagtcattaaactaacccaacttatgattacaatttgtataggagcttaatgtctccgtgtataaaaaatattatttatttgctgctcattattttatagaaattactagacatttataagacattaaaaagaaattaaagaaattataaacattgctaaaacttatatgggtaaaagccttctgctgactgaggttaaagggaataaagcaatcaaaaaaactgcagtttactacaagaattttcacgaaaaaatataggatttttttataacagccatattttctacgcaatcgatcggaaaataacgtttatttattgtattttttgttcatttagttgatttttttcatgggaatgaaaatcattatcatttaaagggatttattatagttaatagacaaatatattttagtaagttaaagagaaagaaagaataggagggaaataaagtagaggtgagtaaaaaaaggcataacaaaaaagagtattatagagcgttaatttttgcctgataatacccgttggcaattttgcggatatacgtaaagaagtttgactccatttcatgcacaagagggcgaaatgcatccatactttcttctatgtaagtttgttgtaagtaacgctgaacggacgttaatgatttttcgattatatctaaaccgaactcatgcacaatggaatgaatatcttcttttttaatggaataatggccaaaagatttaaagaaattcttaaactgagtaaatgcatgctctccacggattttttcgatttctttttgttttttactatcatgagcaccagttaaattgaagcttaaaataaaaccatccttgattttttcaataattgattttcttggctgcttttcttctaataatgttttgacacaatcatctttttctagcacatcgatacggaaaattttattcaatttactagccatttctttaatagcagctttatagccaatgtattttggaagaatgtgttttacctcggtgtaagataaaagggcttctgaatctttctttacgtttacatcagattcgtatacatacaaagcacgtaaagccaggcgcagcatgttaatatttttaatagccagcaattgataaatcacttccatcgaaacagaagtataaccgccttttgaagtatatgtattgttatcttcatcaagcatttcaggattatatgatatgttttgaacatcagcagcttcttttatatgtaaatctaaaaaatcctctaaatagttgtttaaagaaacttgaatatagtctccccataaacgatcccagcgaatgatgtcgtagtcttctaaaagcttattattattttgaacggtccgaacggaacattggattgtattagccagttcttgctcagaaataattgaaatatgaccttggctgttacatttggctacgtaagctaaaatttgcttcatcagagaacccgtccactttatgtctacaaagtttttcgctagaccaaatgaatgtttttcatagtaatagctgttgtctcgtttcgtgtttctatttaagccgctcatgacaatcagcagtttatttgctacaagggtgtgccgttttagtgacagcttttgtatactcatgtagtgacctcctttccaaaactatatacgtcgtcttttacagtatagacacagtcatataggctgtaaaatgacatatttgcacggggaaatggtgcatttttttaaaagactagtgataccaagggacgagacatccatttaaaaggtgacatatttgcacggagatgtggagcaaaaatagtgttatatttcataaacgttgataaaacagcattcttaagacaaatgtcgtattatgacggatgaaatacacgtaatgtgacaaattcaaaaaaaattttgatgtaaaaatgacatatttgcacggagaataggagcaaaaatgataaaaataaagattcgggcgacaaagtgacacatttacacggaaaatagggacataaaacaaaaaaatgcccttttttagacacagaaagttcacatttttacaaagaataaatgaacatttgcagaaaaaatcgcgcttttttaaaaaagtggcatatttgcacgggaatctggagcaaaaaacacttttgcacggagatttggagccaaaaatgcagaaaacggagggggaaagtcgctgtctcaagaaaaattatgtaaaagtggcatatttgcacggaagattggagccaaacttatagtaaatgcagtatagaaagaaaaacggcacattcgcacggggatctggagcaaaaaacaattataaatacttttttagacacaaaaagttcataaaatgataagaaagatgaagtttaataactatatcagcaggggaaatagtatgtttatatggagaattggagcaaaaaaacacttttgcacggaaatgtggagcaaaaaatgcagtaactaatggtagggagataaaaagaatgctcttataaagatcataagagcattcttttttttagcctatagaacttgttacgttttgataaatagaaaggggagcatattcgtaatcaccagctagtaagtcttttacttcactttctcccacaggaataaaggtaatctgaaacacttggcccactcttttataggattggacagctagtttttgttcgactagctcatctaaggctgtttcaatttcgacaaggttttctttttttcgtctttttcgaaagcggactcttgtcgaaaaatataaataatctcttgtgacattgtatgaagattttgtttcatagcaaatgagacgctctttttgcataacgaatagcaaatgataagcggcgtctaaacttaatttttctactttatttttataaatacgcaccgtttggcgttgaatatagtctctatatatcacttcattgacgtgaatttcagcaattcgcgttccgttgggcatggtagtaatatccacaaagtcaaaaataccgtaggcaattttcttattatgctgtacttttgtcatgctatagtgcttcatttttgtaattctttcttctatcatctgatagttgcgcttactgtctgttttataaagtgctttcacaaggtcaccaatttttacgttaataattttttgtgtagcgaacaattcgtcgcgttggctcatgatctctaaaaacactttataatcaaaccgatctaaatcactaattttatttccattttcttcagcgtattctttttctattaacaattcgtaatctgtcccgtcttcagagttataagtacttaagaaatattcttttccttctttctctaataggggttgctcgacgagaagctttgctcttgagttagagaaaaaaggattctctacagttgaaaaagggctctcaataatactatgatttccgttttggaagcttgggtccagtatagtaagcccaataataatagatatatccgtatggattgctttttctcgctgggtcttggttttttgatgaatataaggataatccgttaagaagaagctatcttcttgactccattcacgtaggataccaattcgtttatcaatgacttcttccggagatgatacgttttcaaactgtttgcaaaagagttcttttccattcgttttataataagctgttagcgctttgtattcgccaatcagctctttatttttcttaggctttttttgctcatagtcgcgtatagcagcatctaaccatctgcgtttcgtacgattgagaaagtccttttttaaaatcctcaacgcttcgtttacatctttattttcaaagtgctgctgataaagagggaggatggtgctttctaaatcaccttttatactttcattataaacagataagaggcgtaatttagatactctatcaatgacttcgcgtatgagtaaagatgaataatccatacacatctaacctccttaaccttaagttagtcattttaatccttagctggatagtggctttaaatctattgtaatgcacgaaagttcgatgctacaaacaaaaaaaggctactatctatagtctatttttcattatacacgtgcaaagcagaggaagggggagattttctcattttcttttttagtaatctacatttggtcatgaagcatatatatttgccgtgtagcttatgtatggaggataaacgtgtctgcaagaccgctaattctgctaccgagtttaatggactgatagaaagtatctcaaaataaaaggatattagcgattaaaagagaatacgttgtaaaactactaaacctataccggaggtcataaatgaaccctatattaaatgaagtaggcacggtttttattcctgtaaaggacataaaaaaagcacgagattggtattgtgacatactaggtttgatagcagatggagacattttatatgatcatttatatgtgatacctatgaatggaacaggaattgtattagatagcaaaacttattcaaaaaatacgctttttaaaacgccagcttttcatttgaatacaaacgatatcaaagaagcttatgaatatatgaagcagaaaaaagtagagctaacgacaggaattcaacacaatcattggtttacatttaaagatccggatggaaatcacctgatggtgtgtcagtgctgaacccatgggaagataaaagacattaggacataacgaaattaccccaatctaaagacgaacaaatgagataaaggagctgaaccgcttgtgacaccgctgttgagtttcgtgtaagacttccgcttttcacgcagaagtcttcaccttgccctccaatcaacagctagaagcagctgcacgaaccctatgttcaatatgacaacaaaaaatccgaaccattaatcagattaatagttcggatttaacttcaactaagatgcttttttaccagcttctattggatagcctcgacattttacaatttgacagatttgtttctgaattgaatcattcttacaatatttatcacaattgtttttgttacagcataagctggaatcgctaagatcattccgagtattcctgcaatattacccgcaacaagcaataaaataataatcgttaaaggatgagtgtttaatttctttccaattaccagcggagaaataatgttcccatctagctgttgaacgattacgacgacgataattactaatatcgcttttgtaggagagtataataaacctacgattaaagcaggtgctacgccaatgaaagggccgacgtacgggataatattagtaagggctcctattagtgcgagtatcaatgcatagggtaaccctatgatgaggtaaccaatgaatgtactaatacccacaaacaaacaaacgagcatttggccttgaatataagtagctagcgtatttgttgtttctttcattgtacgtaacgtttcttttcggtaagaagcaggaaccatacgcagcgtgtttttacgaagtttatggctgtctttaagcatataaaaaagaatgaaaggaacggttacaaccgtaagtgtaatattcgttacgacgcttaaaacagatgaaatactgtttgtgagattcgtaggtaaagtagacgcgtagtttaaaagtgactcttcaatatgatcgagcgacacatatttttgttcaacgagccagttaaaccatcttgagttagataaatcatttatgtactctctcgtttctacaatgtaagacggaatatttttagccaaatcagttaattgcttagataaagtaggtcccacaccgcccacaatagaagcaattacgccgataaaaacaacgtataatagtaaaatggccagtgtttttggcactttttttcttgtgagaaatgacacaattggttcgaataaaaagaaaagaaaaccagctacgagaatagggaaaaacaaagtggagataaacacaccgattggtagaaaaacaaacgaaatatgtttacaaatgtaaatcagtaaagcaatcattaatagttctaatgtccaaaaatgcagtttcgatttaaacaaaaagttaccctctttctttactattttttactatcatacattaaaaaagaaacccactgcacgtgaaaagtgggctttttagtctgtataacttttatttacataaaaattaggatttttcctctttatcttcagtggtatcctctggagtttttttgtcgtcatcctgtataattccttccgctgcatttttaaattctcgcagggaatgtccaaatgctcgtcctatgtccggcaatttactcggtccaaatacaattaaggcagtaatcccgattacgaccatgcttgttgctcctggcatgatatcctctcctttaaaagcaatgaatatatgaaaattaaaaagagatagtaaataaagtgcatgtttatactattcacttttctctttaaaattcctttattttaaatgatacgaaaataaggtgcagcggctatgtatgatttaaatgctaacagtgatatttcgcatacgaaattaattatagcattaaagacagccgttcgccttattacccctgcataagttctatgtaaaaaagtcttcataagaatttgcaaagcaacggaggcaaatacggcttatggattcgagcctatgaacgttctcccgtcacaaacctaacgattcgtcattctaatttccagcatgttgcaacatcattattgatggaaaatgtaaaggatcctgcgtttgaagagctttgtataaatggaagctgcatgaacacaaaccggtaaaaggtgtgtttataatcagctgcaagtaaaaggcggaacaagagtatcttagccccagaagtagccgcataattaatcgagattattgattaattgtgcggtctttttttattgtgatggtgaaggtagatttaatgtgttaataatggtaaaaacctgctctgtaatttttactattttatagataagtcaaatgactctgactaattgatagataacatgtatgaaagaaattacttttgctgattattttataagcaatttattacctaaatgtggatatggtaagtgtgagggnnnnnnnnnnnnnnnnnnnnnnnnnnnnnnnnnnnnnnnnnnnnnnnnnnnnnnnnnnnnnnnnnnnnnnnnnnnnnnnnnnnnnnnnnnnnnnnnnnnngaataaagttcataaaataaacttgtaagcgttttaaaaaattagaaagtatgtatcttgaaagttgaatagagatttatttatgaagaaaataaatgtgatttttttgcttttgatccctgtttccgagtagaccttaacagttagcagcaaattattcatttaatgaaataaagaaatagataggagtagagaaaaatgtacatcggtgtcgattattaccctgaacattggccagaaaatatgatagaagaagatatccaaggcattaaagagctaggatcaaacatggtaagaataggagagtttgcttggcacctaatggagcctaaagaaggtgaatatgacttctccttttttgatagcgttatcaataagcttaaaaaacagaatattgatgttatgtttggtacgcctactgccacttttccggcttggcttgcgaagcagcatccttctattttatcaaaagatgaaaacggggcggtcagagcctttggaggaagacgtcaatattgttttaattcgcccctttaccgaaagtatagcgctcagattacagaacaactcgtaaagcactactgctcagaagaagcaattgtagcatggcaagttgacaatgaatttggccatgaaggcagtgacatgtgttactgcgaacaatgtcataaagagtttcagcagtttttggaaagacaatataaagatatcaatgagctaaatgaaaagtatggcactattttctggggacaaacatataacgagtttactgaagtgcctatgcccgtaaaaacaattacgacacacagcccttcgctaaagcttgactgggcgcgctttcgttctttttcgttaaacagatacgctcacgaacaaacagcgattgtgaagaaatataaaggtgatcaccagctgttgacaacgaacgtatcagggggcttttttgataaatggtttgaccatgaagaaaatctagaagtaatggactttgtatcttatgacaattatccggtatggggcggtcaaacagagcccattaccccggctcatattgcattagggcatgattttaatagaggtttgctacataaaaacttctggattgtagaggaattaatgggcgctcaaggtcatgatatcatcggttatcttccgcgacctaaccaggcaaaaatgtggtcttatcaggcgtttgctcatggatgtacgaatatgctgtatttccgttggcgcggaatgacaagaggagccgagcaatactgctatggagttgtaggtcacgataatcattatggaagacgctacaaagaagttcagtcgttatttagtgaaatcgttcattatgaacatgtacttgagtctggtattaaatccgatgttgccgttttgtatgactatgaaaatatatggtcatggcgctttcagcagcaaagtgaaggatttgactttacgcaggagctgcttcgaggatatacaccgttttataagttgaatacacctattgatgttattcctgcttcgagagatttttcaagctataaagtattggttgttccggctttgcaaatcattgatgaagaactaggtaaaagatttactgaatttactgaaaacggaggcgtcatcgtttttacgtttagaaccggcattaaagacaaacaaaataatattcactttaaacagacgctgcccggatatgtaaaagaaataacagggattgaaattcatgaagtggaagcactatcttctactcagaaagcagctattaaaggggtaggaccgtatgaaggagaacaagcaagtgtgtccgtgtggagagacattatcacacctgtaacagctgaagtgctgtatgagtatgacgatccattttataatcaagcggctgtaacaaaaaatcagtttggtcgcgggacggtttattatgtaggctgtggaattgaagagcagacttttgaaaaaattgcgcttgatattgtaaaacagcagcatattgagcatacggaaagtgaagagggaattgaagtatatcctcgcaagcttggagagaagagttattcctttcttatgaaccatacgcccgaagtaaaagtgtttaaagatattgttctgcagccttacgaaagtcgagttgtggaaaatatacagccgtaatagaagactagaatctcaaaaagcaataagattctagtcaccaatgagatgaaagcgttttataggagaagggagttaagttatatgagcatgggggtacagtcaaaagtttctctaaaaaccgtattatcatacggaatggggagttttggaaacaatattatttatgcattaacaagtacatatttaatgattttttatacggatagcgtaggactaaatgctgcagccgtaggaactttatttcttattgcgagaatatgggatggaattgcagacattattatcggaatggttgttgataatacagaaacgagatttggtaagtttaggccgtatcttttaataggcggattttttgcagcagttgctacagtcgcgtgttttattagtcctgatctttctcatacaggaaaattaatttacgcttatatcacctatatcgcatggggaacaagctttgctattatggatattccctattggtcgctttcagcaaccattacacaagatgtaaaagaacgaaataaagtagtggcgtttcctagaaccattgcagcagtagggtctttatttgctagtttattaactcttccactagctcattattttggaaactggtttatgcttagtcttatttatgcgtgtatcttaatgattacaatgattattacattttcaggagtaaaagaaaactataccgtaaaaagacaggaaaagcagacgccaaaagcagtttggaacttatttattcaaaataaaccgttgcgttatctaattttctcgatgcttttagttgaaacgattttaacaattcgaactacgttttctatttactattttaaatacaatttaaatgcagagaatatcgcgtctctttatttaaccttattttttacagcacaaattgtaggagcgatcgcgtctcctttcatttcaaacaaatttggaaagaaacgcgcagcaatagggggaattgccctaaatgctgtagccactcttacaatgtttgtaaccggttttcacgttatgcctgtaatgattttaagctttttagcttctttcggcggtggagttagcaacattgctcaaacatctatgctcgctgactgtgtagaatacggagagtggaaaacggggaaccgagcggaaggaatggtgttttctacgaatattttcaaaacaaaggttgcttcagcagtgggtggagcagtaggcgggtacatcctttcagcagtaggatacgtgccaaatcaaattcagtcacacagcacgctcatttggatcgctttaatctttacaatcattccggggattctttgcttgttatcacttgtcccactggcaaaatatgagttgacggaaaagagatatttagaaattttacaagatatgaaaaagcgctcaggccgcataaaagaaaaaacggctatgaaggtgcctagctaattcaaatcagcacaagcattgtacacaaaaacaacaagaaaaaaagactgcattttctcagctcctcttgctatgatgtcaggtagacagatatcaatgtaaagaggagttttgtttatgtttattaatttttcaaaagaagataaagataaaatgctgaatgaaattcaaacgtttttttataacgaacgagatgaagaaatcagtgaatttgctgcggaaaatgtattagagtttattaaagaaaatatcggccctcacttttataaccaagcaattaaagatgcagaagatattatgaaccaagtgatgctttctgcagaagaaaacttgcatgcattaaaaaaaccaatcgaaaagtagttcaaaaaagaaaatatgaagtaggacaaaagcgttttatgtaaaaaaacataaagcgcttttgtttgtctatgaaacaaattatttgttcgcctaagtgatgtatgatacattcgttttaagataatattaacgttaacgtaaaggttatattaaagtgctttgatttaactcgacgagggcataacttcagcaagcagggacataatgaggtaattatatgaggaaagaaggggttatacgtgagcaacattactaaagatcagctaacaaaatctattgtgaaagcaaatgaaaatcgtttaacggataatagtgattttgatatctatcaagagcttgaaaatgtgcttcaaggagtaggtttatcagcaaaagacagtggaggaaacattacgttttacggagaagatccggttgttcctagtacgctgcgccttgcctcagcagcagctattgcactagttgctaaatcagtagctgtctcaaaaatttggagaatacgaggcggaaaaggtcaagatattcatatggatttacgaaaagctatacgaagattatcacctttttacgataaaaaatgggaaaagcttaatgggtacgcaccaagtaaagcaaatgatccatataacccattaggctttcgcttttatcaaacaaaagatgacaaatgggtgatgccgctgaatccatatccacgctccaagcatgaaacgctaaagctgttaaatggtatagaagaccctgatgcagtggcaaaagaaattcgcggatggaatgcagaagaattagaaaaagctgcagcggagcgaggagttatcatgcctgttgtgcggacaattgaagagtttatgaatgagtccgtgtatgaagaaatagcgcagcttcctttaattgaaattgaaaagattggagaaagtgagccgattcctttttcaaagaatcctaaaacgccgctagatggtgttcgagcattaggccttggtcatgttattgcaggagcaggatttggtagagcgctcgctttacacggtgcggacgtgttaaatatttggaagccaacggactgggagcatgatacgatttacgctacgtctaatgtcggtatgcgctcttcaacgctggatatcggtgaaaaagatggaaaagaaaaaatggttgaaatgctacaaggagccgatatcttttttgcgaaccgtcgatacggatttctagagagatacggtttaacagctgaagagtgtgccgaactaaaaccaggaatcatccactgtaccgttaacctgcacggaacgcaaggagagtgggcgaaaagaaatggatttgaccaaacagcgggaagtgtaacgggagtcatggcattagaagggtcgccagaaaatcctacgctgcctcctattgtagtggtaaacgattatgcggtttcttggctgcttgaagtcggtgctttaatggcactagaaagaagagcaaaagaaggaggcagctaccgcgtgcgtgtatcattagatcgtgtatctttatggattttatcaatgggcatctatgacaaaacatacgctcatcaaacagctggttcgtcagagaagcatgagtacattgcaccggatctctttacagcccaaacacctttaggattgtaccaagggcttacagaacaaatcgaaatgtcggaaactccaggggagtataagacggttctcgttcctcgaggttcttcatgcccagagtggttgtgatatcaagaggctgagacaaaagtattttagtggaaagaaaatccgaacaatgaatcgagattcttgataaaggatccaactcgttcggatttttttgttattgtgacgaacgtaggtttcgtttatgtgggtcggtgcttctagcggttgattggatggcaaggcgaagccttgcacggaaatcaacagcggtgtcacaagcggttcagctcatgtatccaatttgtttgtctttagattgaattgatttcgttatgtcttaatctcggtttttgggggtcaaatttaaaatgaaaaataagaaaaaatatttgaataattatatgatttcttatataatagcgaaaaggatgaggagttgacttgtaatggaaaactatacgtcccgcaaaatgacacgagaagaagtaaaagtatcagacgcgacagcagctcaactagtgctaaacaaatctcttcgtgactttaaaaaagcacagcttttactgcaaattgatcagtcgttagaaaaaagagataaagaaacttttttacgtttaactgaagagttaaaagaagtttgttaaataacctactaacataaacaatcagcctttgcttctagtgagcaaaggctttttatatggaaaaaaacggataaatgttttgttttttctgaaagcggtaaaagtatagtatggatgataaagcaaaaatcaagaagtctcttactttattattttttgctttatcatctacagcatctagatagtaatacatcacgaaagaacaaaaagagagagggttctttatatgtataacaaaattttagtcgcctttgatggctccgcaccttccattcgtgctcttcaacatgcaagtaaactagctaaaagcgtaaatgctaataagctgacaattgtacatattaaggaaagaattcacttgcagcagcctgtttttagcgttgacttagacgcactgatagaagaagaaaaccgcgatattttatctgaagctcacaatcatttaactcaatcaggtattccatatgaggcatacggtttagaaggcacagcttcaaagaaaattatcgaatacgcaagcgacaatcaacaagacgtcattgtaataggaagccggggaaagggctttgttaaagagacctttttaggaagtgtaagtcacgaagttgctcaatccgcagaatgtcctgttatcattattaaataaaaagcatgttctccttggagaacatgctttttattttgagttaatctgtgtcgcctttaaatcgtctggtgctttagctggctgggaatttttaatatggtaaaagcgcaggaggtctccacgtaatacactacttttattagaaagctttaagaaaatgaaaaaatacatgtctaaataactaatcagacgagataagacctagaagatggtatagctgtaaagccttacacttccataagttatctctaaattcgataaattagcatatataccgcttcatttacttctgttatccttttgtttgcagaaaaacttatagtgtcagatgcacggtttataaaagttttcgctcttttgagtatatgactttttacaaaaacaacgcgatctctacacttttttctactagcaaaataaaaagtgtagagaaagtgataaacatacatagaggatataaaaacagaggtagaaacgttttttcctttacatcatagctaaaaaggatagaaagcaggtatggatgtgcaaacaacacgattcaacaaaaagaacaggcgagacgagaagacggctggttcgcacacggacaaaagtaagaaaaaattcatttttgagactagttctctaaaacgatggcatattattataagtctatttatactcctaatcatttttactcttttttcagctttcgtttcaggcttaagccttcactttaatccggtcttgccaacatgggggactgaagaaaagaatgaattttcgactatttatccatccgataacgatagcggccggctctcttctttttcagaagatgagtctcataaaaagtttttagaaaaccggattgtgaacaaagaagatttttatgcgttctatgttaattgggataaaaatagtgaacgttcattaaaaaataatattgaccaaattgacgttcttgtacctcaatggttttcattaaattcgaacttggaattaaaaagcagtgttcaaaaagatatcggagattttgctaaaaagcatcctacaaaggttttaccgttgctgacaaatgagtcgaatggaaaatgggatgaacaaacggttcaccgcttgctgcaatctcctcaggaacaatccaaacttatacataatttacatcgtcaaattaaagaaaatggatatgatgggataaatatagattttgaaaatatcaaaagcagcgacagagagttactaacagactttatgaagaaactttatacagccttccatgaagatgggttaatggtaactatggatgtgcctccagctaataaagcattcgattatagccgtttagaacagtataatgaccgtatgattttaatgatgtacgacgagcactttcaaagcccgggtcctattgcttcattttcttggtatcaaaacaatttatcaaaatcgttaaaagataagatgattgttagtcttggaaactatggatatgactgggatgaaaagagcaagcaaggaggaaaggtcgtatcatttgaagacgtcatgcgaatggctcaaaaagcccacttgaatgtagagtgggatgataaaagcaaaacgccgtatgtaaattataaagacggaacgggtacgcatgagctatggtttttggacagcgtgacattttataatcagtggaaagctgcttcaacaagcggtgccaaaggagtcgctttatggagactgggaacggaagacccgtctgtatgggatgtagtaaaaggacataaagtaagtgagattcagactgttaaaaatggagaaattgcttacaattatggagaaggaagcatacttcatgcaaaaacagaggcttctccaggagaaagacgttttgcttttgattcaaaaggatttatttcaggggaagagtacacagcaatgccgcaagctcctgagattgaacggctaagcaaaatatttaacaaagaaattgttttaacatttgatgatgggccagatcctgaatacacagagaaaattttaaagattttaaaagcccatgatgtaaaagctactttctttatgattggtgaaaatgcagtatttcatcaagatattgttaaagaagtatataaagatggtcatgaaattggaaatcatacattttcccatccaaatacaatcaatatttctaataatcagctaaagtatgaagtaaatgcaacagaacgaatcattcaaggtatcactggtcattcatctattttatatcggcctccgtatggagataatcaaaacatttataatggttacgatgaaacggtatatgatccagcttcatttcaaaaaatggcggatacgacgaagatgggatatataactgttaactacgatattgattcgagtgactggaaagctaaaaatagtaaagaaattgtaaaccgtgtgatgaagcaagcagagaacggtgatattatcttacttcatgatggaggaggaaaccgagaagcaacagtagaagcactgcctcaaatcattgaaaagctgcaggcacgagggtatacatttgtaacagcaggggatttgacgaacaaaagcagggaaagtacaatgcccgccgttttaaaagcagagaatccgattattcaaaacatcaaattgattctagcgaatattgctgcgctgcatactgtttttttcgttctgttttatggaacattaattgtatttacactgcgtttgcttattgtcttttatctcgcgcttaaacataaaagaaaagctgataaactgcattttgatgcttcatatcagcctttagtcagcgtagtcatcgctgcatacaacgaagagaatgtgataagcaggacgatcaagtcggtgttgaagagttcatatcaaaatcttgagattattatggttgatgatgggtcaacagatggcacatcaaaggctgttactgaagatttcagagacaatgacaagtttcatcttcttcgaaagaaaaatggaggaaaagctgcggcgatcaatttgggtatccaaaaagcagaaggagaaatcattgtatcaattgatgccgataccattatttcacctgacgctatatcacttatggtgagacactttaacgataaaaaagtaggagcggtatcggggaacattaaagtaggtaatgtccgtaatttattaacaacatggcagcatattgaatatgtgtcaggttttaatttagagaaacgtgctttttctatgcttaattgcgtgacggtggttccaggcgcaataggagcatggcgaaaaaaacttgttcaagaattaggatattttacggccgatacattagctgaagatacagacatgtctctgcgtatattgcgcagcgattataaaatttcaattgaagagaaagcaagtgcatatacagaagcaccggaaaaacgtaaagattttctcaaacagcgccatcgctggaactttggaactttacagtgcttgtggaagcacaaaagagcttttggagggcgcaagcataaagcattaggttttatggctcttcctaatatgctgctgtttcaattcatttttcctttatttgcaccatttttagaccttttatttgttttgaggctatgtactggagatgttaaacattcggttcttctatatgggtgctactttattgttgattttcttgtttgtttagtggcctttagattagagcgaataagcagtaaaccattggttgctctagtgatacaaagaattgtgtatcgctacttattactatgggtagcttggaaggcagttttagctgcattaaaaggaacaagagtagggtggaacaaattaaaacgctccggaaatttgcaggtaacaagagacagttcaactgagagaactgggtgaaattgcactatttaacgaggttaattagcttttgctaattaaccttttttattagaaaaacagtaaagagttcacttaataatgatagttaaaagaacctttatttttacgcctatcaatagggggtattcacatcccttcgttgttcattgaaatgctgttctgcgtacgtgcgtgtacctatggtaaaatgtcagagaataacacttatttgactaattcagtacagttgtatcaacagaagaacctttcttattagggaatttttcatagtataaagacaattattttgtggggcatttttattctgcacagtttcttcaactattacttctataataaaagcaaaggatgtgaataaatgaatcgaatttctattaagcttggactcttgtttttaatgttcattttactaattgaagcggctctctttttttacttatatagcggtcttgccaacacacgaatttcggaggaattagaaagtttgcgtttaagaggaaacagtcaccgggaagtattagagaagcatcatgattcggctacgcttaaccatgttgcactgatggaatctgaagcagaaactgatgttgtcataacagataagacaggaaaaattatcagttcgtctcggcctttaattcaaggtgcaagaaaagcggtagagaaatggaaaggaaagtctcttacatacaaaggtgaaattatgcaaggcgactggaaaagaaaaccttatatcgccacagcatcacctattaaaaaaggccgtcagcagttcggaacggtttatatgttcaaaaacacaaatgatattcacgaaatgattgcgagactacagcatcatttttacgtagccggagctgtttccattttattttcaattgtgactatttttgccctgtctaaatttataactgctcctttaatcaagatgaaaaaagcaacagagaagctgagtcaaggggatttgtctgtaaagcttggcgctcattcaagagatgaacttggacaattaggaatgtccattcagtcgctagcaaatgagctgcagcggttacgaaaagagagaaatgaatttttaagcagcatttcacatgaacttcaaactcctttgatgtatttaaagggatacgcagacgttgctagaaggccttctaatacaccgcaagaacatgataaatatcttgctattgtggaagaagaagcggaaagaatttcacagttagtcaaagatttgtttcagctggcgcagctggatcagcatacgttttttattcaaaaacaaaaagtagaactggctacgtatttgcacaccatatgcgcgcattttcatttagctttaaaagaaaaagagatggatctggacataagctgctctcaaggtctttacattttactagatcctgaaagatttcagcaagtgattatcaatttacttgataacgcaatgaaatattcaaaagaagggactaaaattgatttgattgtaaaaaaatcagctgaatcattgacaataactcttaaagatcaaggaataggcattccagaacaagatctgccttacgtatttgacaagctatatcgagtggaaaaatctcgctcgagaaaaagcggaggatacggattaggcttatcaattgtaaaggagattgtagaagctcatggaggagagataacaatcataagcgagaggggaaaaggaacgaccgtagagattgtattaagagaggatggataggatggccactattttattagtagatgatgaagcaaggatgctggatttactagaactttatctgctgccaaacggatttacatgtataaaatttgaaaggggcacagaagcgctgcgctatctttatgaaggtaacaaagcagatttgatgttattagatattatgatgccaagcgaagatgggtgggagatttgtcaaaaagtaagaaaaatgtctgatctaccggtcattatgctcacagcccgcagccaaacgttagatgtagtaaaaggattaaatataggggcagacgactatattactaaaccgtttagcgaagaagaattggttgcacgcatcagcgcggttcttagacgttccttaaaagaaaagaatgaaatcacctataaaggcttagtatggagcaaggaagaccacgtattacaatataaaaatcagtacattcaagtgacccctaaagagtttgaattagtgggattacttcttcagcatttaaatcgtgtgttcagccgggacgacttgcttgtgttagtgtggggatatgaggctgagattggagatcgtactattgactctcacgtgcgaaatgttcgggataagcttagaaaagcgggttttcctgtagacgaatacctgcaaaccgtatggggaataggctataagtgggttgatgttagttgaaaatgatatgagcatagctatcgaaattggtgaaaagataaagtaagcgaccttttccctttacatagggtaggggggtatagtatgatgaagtcatgaagggaggatgttagatggtcgaagcgaatcacatgaacagtgaagaaaaatgttgtacgataaatagtgaaagaaaaagtcaccattctccagaagtgaaaaaaaatctaacaagccgattaaatcgaattgaaggacaaattcgaggaattaaaggattaatcgaaaaagatacgtattgtgacgacgtgattactcaaatcgcagctgcgcagtctgctttaaatagtgtaagtaaaattttgcttgaaggtcacttgaagcattgcattgtagaacgtgtgcaagatggtgatgaagaagtagtggatgaattattaacaaccattaaacgattaatgaaataaaggagatgctaaaaatggaaaacgtaacattatcggtacaaggaatgtcttgcggtcattgcgtcaaagctgttgaaggcggcgtaggcgaacttaatggcgttaaaagcgtagaagtaagcttagaagatgcaaaagtaacagttgcatttgatccaagtcaagtaacggtcgaagatattaaagaagctatcgatgaccaaggttatgacgtagcataaacagcatcgcgtgcgaataccttcgcacgcttgatttaggaaaaatatatacccctaataggtatataacaggaggcgaagcgtgatgagtgacaaacaaaaagaagccaccttgcaaattacgggtatgacatgtgcagcgtgttctaaccgaattgaaaaaggattaaaaaaaatagaaggtgtaaaagaagcaaacgtaaatttggctttggaaagatctactatcatatttgatccgtctaaaacaagtccacaggcctttgaagaaaaaatcgaaaagcttgggtacggagttgtaagtgaaaaagtcgaatttgctattacgggcatgacatgcgccgcttgttcgactcgtattgaaaaagggttaaacaaattagaaggcgtgacaaaggcaagtgttaaccttgctttagaaacggcttctgttgaatacagcccttctcaaatagctccgcaagatataacgcagcgagttgaaaagcttggatacggagcaaagctaaagtcggaagaaaaagaagaagagcaaagctatagagaaaaagaactgagtaaacaaaaaggaaaattttggttttcatttattttaagcgtaccgttattatgggcaatggttagtcattttacgtttacgtcgtttattcctttacctcatatgctgatgaatccatgggttcagctcgctttagctacgcctgttcaattcgtggtagggaagcaattttatgtaggcgcatttaaagctctgcgtaacaaaagtgccaacatggatgttttagtagcactaggcacaagcgcagcttatttttacagtctatacttttctcttaaatcactggggtcatctgctcatacgaatcagctttactatgaaacgagcgctatattgattacgctgattcttttagggaaattatttgaagcaaacgccaaaggccgttcttcagaggcaattaaaaagatgatgggcttacaggctaaaacggccgttgtcataagaggcggagcggaagttgaaattccagtggaagaagtccaaaaaggcgaagttatttttattaagcctggtgaaaaagtgcctgtagacggggagattattgaagggcaatcggccttagatgagtccatgctgacaggtgaaagtgtaccggtagataaaaacattggagataaagtaattggagctacactcaataaaaatggttttctaaaaataaaagctacaaacgttggcagggagacggcgcttgcgcaaattattaaagtagtagaagaagcgcagggttctaaagcgcctattcagcgattagctgattatatctcaggtatattcgtgccaattgtagtcggaattgcacttcttactttctttgtttggtatatttggattgcgcctggcgaatttgcaccggctttagaaaagcttattgccgtattagtgattgcatgtccatgcgcgttaggcttagctactccaacttccattatggcggggtcgggccgcgcagcagaatttggtattttgtttaaaggcggcgagcatttagaagcaacgcataaaatcgatacgattcttttagataaaacgggaactgttacaaatggaactcccgagttaaccgatgtacgtattgcacaaggctacgaagaaaatgagctattgcagttagttgcatcggctgagcgtttgtcggagcatcctctcgctcaagcactcgtagcaggtataaaaaataaaggtatagagattcaagatccgttatcttttgaagctattccagggtatggagtgaaagcaactgtacaagagcgaaagctgttagtgggaacaagaaagcttatgaatcaacataaagtgaatattgatacagccttagaagaaatgacaaatttagaacgagaaggaaaaacggctatgctcgttgctcttgacggaaagtatgccggcatgcttgctgtcgcagataccattaaagcgacttctaaagaagcagtttccaggttaaaagaaatgggcttagaagtgatgatgattacaggtgataatcgtcaaacagctcaggctattgggatgcaagcgggtattgagcacgttatagcagaagtgttgccagaaggcaaagcagaagaagtgaaaaagcttcagcagcaaggtaaaaaagtcgcaatggtaggagacggtattaatgatgctcctgcacttgcgctagctgatattggaatggccatcggaacaggaacggatgtagcgatggaagccgctgatattacgttgatgcgaggagacttgatgagcattgcagatgcgattgaaatgagtagaaaaacgatttctaatattaagcaaaatttattctgggcaatgggctacaacacgcttggtattccaattgcagcagttgggctgttagccccttgggtcgctggagccgcgatggcctttagttctgtatcggttgtattaaatgcactgcgattgcagagagtgaggctataagatatgaaaaaatggatcgtctcagctattttgtacgtgctcgcagtcatagcagtatatgctatttgggcaatataaactaaaaaatattagagtcatcgagtcattctcggtgaaagtgatctaaaagcaaagctgctaaagaatattctttagcagctttgttaagtgcaaggaatttttttgattcaattcataccctttaagatgaaggtcttctgggtgtttttgctgagcaattaacacatcacgtccatcatccataatccaaatgaaataatgacggctagaaccatctccataggtaatggtcattttgcaatcgatgctcccagcagattcttcatctaagagaagtttcatatgctgcgctttttttatactgttagtgaatgcattcatatcttgttcatcgataaatgttttgagcgttttcattttaatggacgttacttctattttttgtacgctagatgagagagtggagtgtgcggaagcaaaaggggctcctatcaccaagctaaacgcaagtaacagtgaggacagagcaaagcgtatttttagcatgtttctttcctccttttatttttatattttttccttatggtaagtgattcatacgagggccttttttaggcacaggaattattcgtgcccaattaccttcatcttcacaaaatctgcacaaattctggctacaataaagaaaagaagaagagtaggcaaaggtaagttgtttctaatgattaaatgatttttattttaaagtttattatgtggaaaagagggactgttatgaaaaaacagctatttattcttggggcatctgtcattattggactaagcggatgcggaaacgattctagtcatgaaaagccttcagctgacaaaaatgaatccatgcacgatcactcagagatgaatcactctagttcaggagaggttccaaaaggattaaaaaaagcagagaatccaacatataaagttggagataaagccgttataaaagcagatcatatgaaaggcatgaacggggctgaagcaacgattgttggtgcttacgatactacggcctataccgtttcgtatacgccaaagactggcggaaaaaaagtaaaaaatcataagtgggttattcaagaagaaataaaaggtgcgggtaacgagcagttaaagccaggtagcgaagtaacgcttgaagcagatcatatgaaaggtatgaaaggggcaaaagcaacgattgattcagccgaaaaaacaacggtatacatggtagactacgcaccgactacaggcggagagaaagtaaaaaatcacaagtgggtaaccgaaagtgaactttcagccaaatagactgttagtgaaaaaagaggctagtacaaaagtgttttaggtgaaggaagatccgaacgatgaatcgagattcttgattgagaatctcgattcatcgttcggattttttcgttgttatggtgaatgtaggtggttgcttctagctgtagtttggattgatttttttatgactcaatctctttttgtttacttcttgttttatgttttatcatgagggatttcttgcatgatggatgaagaaaacgcatgtttctttcaaaagaagttgtggtattaagtagaatgctacggtaataaaacgaacaaactactgatgaaaggagctagctatgagtgaacatacagtaaagcgaacaggacgcacacgatggttcatttcatctttgttaagcagtatgattattttaaattattttgatcgtgtagcggtgtcagtggccgctcctgcaatacaagatgcatttcacttaacgggaacagagctcggaattgtcttttctatttatacgtattcttatacgatcatgcaaatacctgccggaagcttgcttgatcggttcggagtagcatgggtaacaagagtgggtatggtgatttggagtttattaacgatgtccatggcatttttgcaaggaaaacttcttctctatatcgttcgatttttaataggaataatgagtgcttcagcttttccagcagcgtcgaaagctacgtctctatggtttcctccaaacgaaagaagcttgccaaattctttgtttgattcagcggcaaaattttcaaatgtacttggcgcgcctcttgtggcatttctcatcactaaatttgattggcgcacagcatttttatccattggaatgataaacgtgctgtttacgctgctgttttggttttattacgaaaaaccagaaaagcatagacgcatatcagatgatgagctgaagtatattcaagaaaataatttaaatgcgaacgatgaacaaacatcaaaatttttacataccttaaaagtcttatttacaaatcgaaaagtttgggggctaatgattgggtttacaggctatggatatacgtttaatttactgttaacgtggctgccaacttttttaaaagagaaatacggcatggatatcatgtcatcgggtctgcttacggcagtcccttggctaattgctacatttgctggcattttagttggcggttggcttgttgattacctcataaaaaaaggatataacagtcaaaaagtatatcgcacgatcattgttgtaggattatgcttagggtttgtttttttaggttctattttcaccaatagtgttgtagtagcgatgatttgtatctcgattggactggcaggtatatctgcaactgcaccaatcggctggtcaatttctgctgaaattgcgcctgcaggctccatttctcttctcagttctattgttaatttagctaataatttgtttggtggaattatagctacagctttaacgggatatcttttggataaaaccggttcttttaatctaagctttattgtagcgggaattgtattgttgctaggcttaattttttatatttatgtgttgggagatattaaacaaattaaaattccaaaaaaacaaagtacgaagtaaaaccccatgacacgctatggggttttacttttgattataaataacgaccttgctcatgcacttagggatgtgaaaaagtctagtcttctgatctgatgctattaaaaggagaaacaagatgaattggtttgtttgaaacatatgatagggacttgttttaaaacagaattgttggtatagcatgttcttaaaaaggttaagatgatttttatgaagaaattctgtgtctatttttgtgatttcagcagaagtagatataaaccgcactataaaaaatagaaaggcagaggaacatgaatcataaagaaagtgaaaacaatactgagttaaatcaaagtcatttgttaaaggagcctcaacgtatagaattatctaagtatcaaattttaaaagcactgatacctgttattatacttgggattgtcgttttagttgccgtattacaaaatgatggtcttcttaattggatttaggcatgcaataaaaagaaactgcatatagtataattcaaatcgcttgtacacagtagagggaaagagggagatacatgccaagagtaaccgttttaggatatggaagttttgaagtggcaaaaggaaaaaagcttgtcttggcactcgaagacaacggtataaatattcttcatcgatgcggcgggaaagctaaatgcacgacttgcagggtagaagtgcttgaaggtgaatattgtgatttaacacacgcagagaaaaatgcatactcagaaagttcaattgaagatcacttgcgcttatcatgtcaaattcgtgtaaatgaagatatcaccgttcggcccatattaacggtagagaactcagggcgagaagcaggacctcgacccgcagagtagtcctgtaatcgcaaaaagcagcgtgtggaatgttcagcatgctgcttttttcatttttattaaaaaataacaagaacagctgcggggagaaaaagctgttcttgttcaagtaaaatacctacggaatgattcctttaaattttagcattctgtaagagaagtagtaaatcactcaaaagagtaattatgaaggcttttttcgaaccgttatttgtaaataggtttaattggatgcttcaatcacatctccatttttgtaaatatgataccaccctatggtacctgatccgccttgatccatccagtctttgttttttgctacgaatctgtagtaagctttatcgttgttatctttccgtaagcggtcgtctgtactgaagacaatgttgtcaccgagttcttttttaccgaatgtaatagctgtgctgacaggaaattgctttctttctaccttgttctcatctaaagctgcccatgttaaggggccaacaataccatctggagacaagctgtgatcggtttgaaattcttttactacgttttgtgtctgcgtaccgaaaattccatcaactgatgtgttatacttcacatcttttaagctttgctgtaagtcctttacgtagctagagtgagaacctttacgaagcgtaggccttgtttctgctttagtttcaattctttgtgagtaggtatctttagcagctgcttcagtagttggagtgctgaatgctacgcatgttgttacaagggtgagagtagaaagcatgataagtgtttttttcgttaacatgaaataacctccttgtttttagcaactatttgtcgcttttcatgagttttataactaatcagtagctataaagtcaatttattatagcgcagacagttttctatttgtttttatattcctatgattatataagatagtcataaaaaactagtgaagtagataaatcgttctacgttttcactataatttcatttttctctggtacagtacggagggaaaaaacagcaggtttgagcgtcttgtgtacctagagtatgtcttactctataacgctcataataaacgaatgaaaagactgcaaagggaatttagatctctttgcagtctcttcatgttcaagagctctgcgttcaaataataaccagaaaggaattatgtgatgtcacctctgtattcccagcatataaggaatcttttttcgaagcaaaagtttaataaattatcgcgtaaacaaatctttctctatatactaggaatttgctgtttgtgtatagcgctaatagtaacaaaccacaattattcgctttataaaaaaccgatagcggaggtagtgaagacgaatgttgtagaacaaaataaatctactgatttaaatcacaacaaagataccgtatattctcaaaaaattgttgctaaaatcatgaacggaaaatataaagggaagcttatccatttagagaatacgtactcatactcaggtgcttatgatcaaaagtacactgtcggaacagatctttttgtctccttagaaaagaattcacagcatgctttaagcggcacgattgaaggagtgaagcgggacacgcaggttaccgctgtcgcgggcttatttatactgattttgctggctattggaagaaagcaaggtttttattcgatcattagcttatttattaatattgtccttttaatcggggcccttaatgtatatttagcactagggaatgtgagcttgctagctgtatgtattgtagctgtcgttctttttacagttatttctttgttattagtaagcggtaatcaagaaaaaacgcatgtagcgattatttcaactttaataggtacatttgtttctcttttaatcgcgtatggtgtcatgcaactgacagattctaatggccttcattatgaaggaatggagtttgtgacgattcctcctcaaaaaatatttatgagtgaggtactaataggatctttaggagctgttatggatgtagcgattacgattacttcttctgtttatgaactatatgaaaagaataaagagatagcgcacaaagacttactgaaatcgggcaaggaaattggcggagacattatgggagccatgacgaatattttatttttttcatatataagtggaacaattccaatggttcttctttatttaaaaaacggttctcctttaggatacacgttttcaatgaatttctcgttagagttaattcgtgctcttactggcagcattggcattgttttaacgattccaattacactctatctttcgattctttttatttttaggaaggggaacagaaagtgaacgttttactgttgcttgctcttattttatttattctgatgagtatggtggggggaaaaaaaggaattagatctttccttgctttgttcttgaattttggcgttatttttctaaccattctctttatgctgtctataaaaaatacgattattgttacgttgatcgcttgtacaatcattagctgcattaatttattttatattaataaattcaatcataaaacgcttgctgcgtttgtttcaacgattattaccttagccgttttagtgttctttatttttatcattgaacatcatgccatgattcaagggtttggagaagaacaagaagaagaaattaacgctttttcactttacgttggaattgactttgctaaaatagccatttgtacaattattatgggagccataggagcgatcattgatatttcgctatctatttcatcttctatgaatgaattatttgttcatgacccgtccgtaactaaaaaaaatctcttcaattcaggactgaaaatcggaagagatattttaggcactacaaccaatacactgtattttgcatttgtagggggatatttgactttaattatatggtttaagagattgtcgtattcgtttggagatattatcaattcaaaaaccttttgtgcagaagtcatttctatcttaagcggaggcattggtgtagccattattattccaattacttcgtggattagtgcctctatttttttacaaaaaagagaaaaagcgaaccatatgtacaaataaaaaaagaaaaattataaggaaatgcccatccaactggtagtcagtaatatttggatgggcattcacattattggtggaatgttgaaaagaagcttaatgtaggctggaagttatagttgaacgaaggattattctctatttttctcactgatagataatatgaaaaggccaggaagcagaatttacaggagaagcagcttttacaaggacggtctcaccgtttgctggaagcagatttttaaacacataaattctatgctcacctcttggagatccaggtcctctggaggttttttggtgtataatatttcgctcattttttggatcgagtatccaatgtgcgtaccaaatctgccgtaaaaattgtctatttgtactttgcgaacgttcatcaaatatacagtgattcacttggcctgtccaatatagatatcgcccgtttcctatatgccattcatctcctatccgatatctgattcctacacattcaccaggatagataatatcagggatattataatgattctctctttgacagctagggtcactatattgtgtataaggcgtaacttctactttttctaactgattttttctaaaatacaaatactgctgcgtgacttgccctgtcgttcggtttacggctcggtggctgagaagaataccattataagtctgtaactttgtgttatcgatgcttcttgtaaccgttaaggtaccagcatttgagcttatgacgccgcctactaaccttccattatgaacacagtacccgtttctgcaagaggcaccggcattagctcgatatagaactcctacgcatgtcccactattaattaaagtcaattatattcacctcgcattccatcttgttttatagaaatagctttcgaaagtgctcttcgtttgaagtgatttctatagatcatccgggccgtatcgataggaaggctgtgtttgaataaagtagccatttcgcacttgagccacccagttttgaaatatttctctccattcaacacggtcaaaaaactcatcaagaggttttgtagaatcccattcaataataaagaaaggaactactgatggattccaaacgcctatactattgacacctgattctttgataagaagtaaaggcaggcctcgttggtaacccatgcttggctctatttgtaaaaacggagctccttcccatgatgggggcggaggtgtaccgccgggaatattcgtcatggtataattggcaaagacttgctgcatattcaccgcgattaacccatagctagagagtatcattcggcgaacgcttgttattgttttattaggatattgctctgtatcgggcagtgtacgagggaaaagaagaacacgttcaatttcatcaattaaacgattaagaaatcttgtttgagtagtattaagcatagaagggtggctgaggaatacagggattttaaaagctctgtcggctgtatttttcaaaggaattttagtggaagcagagggcgatactttattgtctctaagagagtaaggcttgtctacataatatttaccatcttgagggttataataggaataatgtttttttatcataatcatcctttcttatttttctctatattttatgcggatcgacaaaataagtatgtatgtttgtccaaggacattaggagcatttttacgagaaaatgacattaggagcatttttacgagaaaatatacctatagtattatgtgctagattttgtttagattagtaggggaaaaataacttctttaaatcctcagacaactgctaaatcacttttagtttattaaaaaattgtaaaatatttagaaatcaattatagtaatgagcattaatacataagcacattattatctatcaactgaaagggagtaggaggtattcattaatgagcacaaaatctatagatagtattgaaaaggcagcccaaatcttaaaattattgggagataaaacaaggctttcgatggttaaattaatagagaacaatgaatgctgtgtttgtgagttcgtagatatctatcaagctagccaaccttcaattagtcagcatttacgaaaattaagagatgctgaacttgtgaaggaaagaagaaaagggcaatgggttttttattctcttaataaagaaagccagtactatgagtttgttctgggcatacttgaatctgtaccaagtcaggacgaacgtttaaaagagctggaaaaacaaggactgcgtattagttgttgtgaataattggaggtttaaaaagtggcatcagttgtactagcatcattgatttttttagtaacattaatttttgtcatttggcagccgaaaaatttatcaatcggctggtcggcttgcgggggagctatgattgctttactggcaggcgttgttgattttcaagacgttcttgaggtaaccagcattgtgtggaatgcgactcttacgtttattgctattattattatttctttaattttagatgaaattggtttctttgaatgggcagcgcttcatatggctagagctgcaggagggaacggcgtgcgtatgtttgtttacgtgtctcttcttggagccgttgtagcagcgctatttgctaatgacggagcagcgttaattttaacacccattgtactagccatggttcgggcattaaagttcgacgataaaatggtttttccgtttattatcgcaagtggatttattgcagatacaacgtcgctgccccttgttgttagtaacttagtaaatatcgtatcagccgacttctttggtattagcttttctgaatttgcatcacgcatgattgttccagatttggtttctctgtttgcaagtattatggtcttatatctgtatttccgcaaaagaattcctaagaaatacaatgtagcagatttacagaagccagtggatgccatcaaagatgaaaagatgtttcggttatctggaattgtcttagttttgttagtgctaggctatttaattggagaattctttagcgtccctgtttcgattattgcaggtattattgctattctgtttttgatgatggctaaaaaaagccgagcggttcatacaaaaaaagtgttacagggagctccatgggcgattgtctttttctctatcggcatgtatgttgttgtatacggcttgcgtaatgctggtttaacagaaattctggctgatgtaatccaagcaacggctagtcatggactgtttgcagcaacaattggtatgggattcactgcggctattctttcatcgattatgaacaatatgccaaccgttatgattgatgcactagcaatcgatgccacacacgcagctggaacaatcaaggaagcgctcgtttatgcaaacgttattggatcggatttaggtccgaaaattaccccgattggttctttagcgacgcttttgtggcttcatgttctttcaacaaaaggcgtgaaaatttcatggggaacgtatcttaaaacgggtattatcttaacgattccgacattgtttattacgcttgttggtttgtatatttggttattgattatttcataacacgtcccaaaggagatctgttttagtcgatatgataatggctgttgccagaaaaattcagatatgtatcaaagctgtagaaaatgatctacagcttttttattgaaaagctataacggacagcgacacgtttttaaaatgagataggtatctctcatctaaactacttttctcctcattcatactccaacagctctttctatgataaaataataaaactgactaagtgtcacatggaaatttgaaatgtaaggtgattaaatacatgaagttaattattgcagaaaagccggatcaagggtcaacgctcgcttcacagtttaagccgaagcgtcacgacggctatttagagattccaccgaatgaagtgtttacagacggagcatatgtaacgtgggcagtgggtcatttatgtcagcttgtgagtcccgaagattataagccggagtggaaaaagtggtcaattgacacgctgccgatgattccagaccgctttcaatatgaagtgacgcgctcaaaagcaaagcagtttcaagtggtaaaaaaactgcttaaaaagccgacggtcacagaaattatacatgcgggagatgcggggcgcgaaggagaattaatcgttcgtaatatcattcagctgtcaggtgtgcataagccgatgaaacgattgtggatttcttctttaacgccaaaagccatttatgatgggtttcagcagttaaaagacgaaagtgatacgcgtaacctttattatgaagcctatacaagagcatgtgcagattgggtcgttgggatgaatgcttcacgggtgtatagcattttgttaaaaaagcatggtatgtcagatgttttttcggcagggcgcgtgcagacgccaactcttgctttgatcgtgaagcgtgaaaaagaaattgataactttaaatcagagcctttttgggaagtgcttgctaagtttgatattgaaggaaagaagtatgaaggcaaatggcatcaagacggagaatcgcgtcttaaagaaaaagaaatggcctataaaattgctcagttttgcgaaggaaaagacgcggaagttcatgaactcgtaacggagcgaaaagagttccagccgcctttattatttaacctatcatcacttcaagcaaccgccaataaagcgtttaagttttctcctaaaaagacgcttgatgtgctgcaagggctgtaccagaaaggaattgtttcttatccacgatcagactcaaactatgtaacagaaggagaagcggaaacgtttcctgagattttagaaaaactgagtgctttttctgaatacgaacatttatttccgcttccgtacgcttcaattctaggaaataaacgctatgtaaatgcaaaaaaagtgagcgatcactatgcgattattccaacggaacaagtgaaggaccccagcaaactgtcaggagacgaacagaaaatttacgacctagtcgtaagacgtctaattgcggcacactatgaaaaagcgattttcgactatacaacgattacgacactcgtggaaaagcgagcagcttttatttcaaaaggaaagcagcaaattcaagaaggctggcgcaaagtaatttttcaaaacgagaaagacgacgacgttattcttccgaatgtccaagaaggggaagaaggaaaagttgttaaagtagacgtgaaagaaggtaaaacacagcccccaaaacgctacacggaaggtcagttgattacgctgatgaagacagcaggcaagcatttggataatgatgagctggagaaaattttagcaaagtcagaagggttagggactgaagctacgcgtgcgggaatcattacaatgcttaaagaccgtaaatatattgatgtgaaaaaaaaccaagtgtttgcgactgataaaggaaaggtattgattgacgcgattggcgataaaattttagcttcaccagaaatgacggctaagtgggagcagcgtttagctgaaattggagaaggagcagcatcggccgctgcttttatggaacaaacaaaaaagctgtcagctaaaattatcgaagacgctgtcgaagcagaaagtaagtggaacttcagcggatacgacactgaatccattcagcgaaaaggaaaaggcaaaggtaaaagcttctcttctaaatcgtttggttcgtgtaaggtttgcgacggaaaagtagtcgataaaggttcattttacggatgctcaaactatgcaaaaaccaaatgcacgtttaccgtatcgaaaaagattttaggtaaaacagtcacccaagctaatttaaaaaaactgttaagcgaaggacagacagatttgattgaaggctttaaaaaaggcgataaaacctttaatgccaagttagaatggaaagaaaataaagtacagtttttatttgaaaaatagagggataaaaagcgtttgctaaagagcaagcgctttttgcatgcgaagaaacaggatttctccagcttttctagaatttcttacatagcttatttatgtaaaggatgagattgatgaaacgaacgggtaaagggatgattccgttttgggattatattggcattgaagaaacgctgcttgaaaaaggatatgcggagttaaaaatcacgattcagccgcagcttctgcaaggaaggggaacggttcatggaggcgttattgccacgcttatcgatgcggcggttggttcagctgtgcggtcttctctttctgaggctgaaagtgccagtacagttgaattaaaagtaaattacacaaggccgggtataggtgaatatttagttgctaaatccacactgtctcatcgcggcaaaacgcttgctgttggagaagtgaaaattgaagacagcagcggtaagcttgttgcgcttggcagtgcaacatatatgattttttcagcaaaaaaagcttaggattctaagctttttttgctgaatgcagctgctggctaatgaatgcaatgatcgttttatagtaagctttgggatgaggagcaaattcacttttatgggctgtacggtgaatcggctcttttttatttgttatcccttcaatgatcagttctgtttgatttccaagccacagttcgcaaaagtgagaaaacggcgcttttataagccctgatacttcttcttgctgcaacgtaaacgcattaagagggtaagagctgtagtataaaaatacgtgtgcaaactctttgtcaatataatgcggctcagatacttcatatttaaatacatctaaaggaagcaattcatcaaacgaaatatttacgccaagctcttcgtgaatttctcttacaccgtccacagcggtttctgtatgaagcaaatgtccggcagctgtgatatcaagcgcaccgggataatcttgtttttgttcgctgcgaatttgaaaataaatatagtctatatcattttcacggctgacaaaccagcagtgaaacgcttcgtgccaatagccgttttcgtgaacttctttgcgagacgctgttcctatgcgctcttgttggtcgttaaatacggttaacacttcatcgttcattataaaacccccatttgtttcctacttctttctgctctaacctgccatgaaagttatgtaaataatggaaggtgaaaatctgcgttgatccatataaatatgcacaaaataaaagatacatcaattttagtaaagaaggtgcatgcgttgaatcattggatggaagtggtacttcgttcagtgctgattttacttggcttgttttttatcacaaagctgttggggaaaaaacagttatccaaactttctttttttgaatatatcgttggcattacaattggagatattgcaggaacaatttcaatggatgtagatttacaggcaagtcacggggtagtcgcaattttagtgtgggcatcgtttcttatttttgtatcaaacgtatcgttaaaaagtataagctttcgaaaagcggtggaagggacaacaacgatcctcattaaagaaggaaaaattcttgagggaaatgtaaaaaaagaaaaatatacagtagatgagctcatggagcagcttcggaaaaaagacatcttttacgtagaagacgtagcttttgctatgctcgaaaccaacggggaattaagcgtgctgttaaaaaaagaaaagcaaaacgttacgagagaagatttattaataaaaggagaggcgacacgattacctcaaacgattatcatggacggaaatataatgaaagaagccgttcatgagctgggatatagcgtagcgtgggttaaagagcagctcaaaaagaaaggtgctgcagtcgataaggtatttttaggtcaagcagactcagcaggtcatctgtatcttgattattatgaagattaaggatgggacaaaagcattttcccctaagtgaaaaacgaaccattaatcaacatgtttgattagtggttcgttttttgtgatggtgaatatagttttatttgtttcgttccttctagcagttgcacggaaatcaactgcggtgtaataagcagtccagctcatgtatctcatttgttcgtctttaggttggattcatttagttatgtttcaaccttagcgtggatctacttcttgtccggattttatatccattactttaaggttattttgaggcgctttaatatctttacttgcaggcgctgcttttttattttccacccagtctactaacaaatcaaaagattgatgggcatatggaagcaggggctgaagctcttgatttggatccgtttgtttattccatactaagctgtcaacgtgatttccgtttttaacggtataaaggcgatgaagatttgtcttgccggcttttttaacgagcttttcatagccttccgcgtgaatagacgggaagataagtgagtcgagagagccagtcatactaataagaggcacatcaatgtcgcccgtattttctacttttgctacattttcttttacactttttggacgagtttgatagcgataattttcaaagatataatcccatgagcgatcacgtagacctgctgaagtaaagtttaaatagttgtgccagtttgttcttcctggagcagttggatcaaagtgatcacggtaaatgtttaatgtgaccgcccagtacacttgatcatgataattccataatttttctgatccttttggaagacctgctttatacatttgtttaatggctttttgctgttcttttcccgttccgtacagcgcttcttctgcgttgttgacaacaggtgttagtgagctaattaaattgggcgcttttgcactccataatacgccttcccaatcgacgcccccatcaaataaacgaggctcttttgtttgctttggatcatcatgttcaagtgcgtatctgacaacgtatccaccgtttgaaatgccaattgcatacgtcggtactttatgattgtttcgaatcaaatcgcttgcaggattttttcgattggacgggttgattagcttgtctgaataatgagtagtcaagtattgctgggcagcttttgtcagttgacgatagcgcatattccattctgctacgctgtcgtcatcgttagcgagtgcattttttactttagcaaaaggatcgttagggtcactttctccttgcgttcctttatcggtggctgcaaatgcatagccttttttaagaacgtaatcgctgaataataaatcggtggacgtttcgttgcgcgtggcaggaatgccggctactacaagttttccgttccagttatcaggaacacggacgacgaactgagcgtcttcaaaaatgccatttacttgggttcctttgaccgcagcgggctgattgattcgataccagcccgatccatcttcaggtttcccccagttataaggagtaagcccaatattgccatagagcgtagcctgctgatattgagcggggtttttagtggtgagccaattcccgttcgctccgtcaaaataggtttctgctgactgatcagcatttgggattacatctgtgttgttagaagcttcagcaagagatcctgaagctgaaaaacaaagagcagcagaaaaagtaagcgctatcatttttcgtttcacgtttcttcctcctcataaaaatactacataccttttaaataaattccataaaaaagaaaaatgtcctgttttaaaatcagtttggaggaaatatttttcatttgtttctaagctgtttgtgtctaacaaacaggtaaactgcatccaattctctagtttctttttaagctgcttatattatataatgaaacaaggattaaaaaagacagggtaaaacaatcgattaaataagtataaaagatatgaagaacgtttctataaaacgtttatcttagagggcaagggagtaggtctatgagcagctttaacagtcagtttttgtattccgttacaatcattctattaggatacatactaaaacgaacaaacctccttcagcaaaaagacggggaagctttagccagaattatttttaatattacaatgccttgcttgattattgtcacattcagcagtattaaaattgatggatcgcttatcttactattagttattgggattgtctatggcttgctgttagctgctgtaggggtttttgtttttcgaaaagatgagcgaaaagtgaaaggcatgctgacgatgatgattccaggatttaatattggaatgtttgcttatccactagtagaaggtatctggggaaaagaagggcttaaatactttggtatgtttgatgtcggaaatgcctttgttatttttgttttatgctatgtgattggcagctactactcaggagataatattgacattgaatttaaaaagattttatataaagtattaaaatcaatgccgcttcttacctatgtaatcatttgtcttcttgcgattataggcattcatttaccatcatacgtattagacgtttcaggaattatctcgaaagcgaatatgccgctctctcttttgcttttaggcgtatatttaaatttctcgttccaaaaaagctacttgaaaaaaattattatgtttttaagtatccgctacgtaatcggactcggcgtaggaattgcgctgtttttcctgcttccatttgaagatatgttccggtatacaatcttagtttgcttcattctaccggtagcgggttcagttttaccttacgcagtagaattcaaatacgatcaaaaatttgtcggcaccgtgtcaaatatgacgattctgctgagctttttgctgctgtggggaatgacaaacattttaatgtaaatagcaaaggacgctcacacttgtgagcgtcctttttgatgaaaaaaggatattcccaaataaacagaggtaagctaggagaagagaaaatccatcatacatacaacctgacgggaggaaaaaaagtggagtccttaacttttgttttatttggcgcaacgggtgatttagcaaaaagaaaaatctttcccgctctttataatttatttacagacaaaaagctccctgatgctatttctattattggatcggggtacgagcagatgtctcatgaggattttaaagagcgtgtaaagcaatctataaacgatttttcgagacggaaaatggaaagtaacgaagaagattttttgtccctgtttcattatcaagcagtagacgcaagcaaaacagaagattacgaacagctgctgaaacttgtgaatgagcaagaaacaactcatggaagtaaaggaaatcgtttgttttatttgtccgtagcacccgaatacttcgatgtaattgctctgcatataaaaaaaagcggcttggatcaaaccagcggctggaagcgtcttatgattgaaaagccgtttggacatgatcttgtttcagcaagggagcttaatgaaaagctaaccagtacttttaaagaagaagaaatttatcgaattgatcattatttaggtaaaccgatggtacaaaatttagaagcacttgaatttacgaaccccgtgctgcaatcgctgtggaataataaacacattgcaaatgtccaaattacggcaagtgaaacagtcggtgttgaaaatcgtgcagggtattatgatcatacgggggccatacgcgacatgattcaaaatcatatgctacagcttctcatgatgacagctatgcatcttccaaaacgaatttgctcagaaaacattttagaagaaaagcaaaaagtaatggagtcactgaggaaaattcaagcgaaagaagtagctcgcgatgttgtacgagggcaatacggaagcggagaaatcgatcacaaatctgttagaggatacaaagaagagcctggcgtagaagcagactctaacaatgatacgtttgtggcagcacgtttatggattgataatccattttggaaaggcgttcctttttatattcgaacgggcaaacgaatgaaagaaaaatcaactcgcatcgtcgtagaatttaaagattctttaaaaggtctgtacgaaactccttatgacaaagtagcaccaaacttatttattattgaaattagtccaagcgaaaacgtcgctttgcagcttaacagcaaaaatccattaaaaaatggtgttattgagccggttcgtattacgttttcaagagaagaagaaagtgtaccggaagcatatgaacgaattatttacgacgcattaatcggcgactctacattttttgctcattggaaagaagtagagctatcttggcagtgggtgcagcctgtattagatgcatttgaagctgacatgctgccgctttatgaatatccatcgggttcacaaggtcctgaagaagcccaggaattagttgaacaagaaggctttaagtggtggcttgatgacgatgaacatggggaagcacctggagtgtttttacctatttaaaaaaagaggctaggacaaaatttttttcgttgaagaaagatccgaacgataaatcgagattcttgatggaggctctcgattcatcgttcggattcttttatttatgtatctcatttgttcgtctttggattgaatgagtttagttatgtctcaatcgcttttggtgtttaatcgtttttgtaaatgaacaaggtcatgatgtaaatgtttttgcatatgttcaacagcttttaaactgcgttttttcataaaggtgaacacttgctgatgctcatctaaaatctcagcagcgcgtcctttacctttaaaattaagcacccgacaaaaataaatcaatacatttacgctatcgagctgtttttttagatgtttattatgactggattgaagaatcagctgatgaaaatgttcatttagctcaataagtcgagaatcctcggctccttgctttatttcctcagcggttctatctaacagctgctcaatgaaaagaagctcttcatcagaagcgcgagtaatacacagctcaatggctaaagactctaaagccgtacgaatttgataaatttcttctacgtcttcaggagacagggaataaacaataaagcctgttttttgatctgcaactaaaaggccgtctttttctaataaacgcattgcttctcttatcggagagcggctaaccccaaatgctttagctagctgggtttcattgattcgctggcccggtttatattcaccgttcacaatcatttgcttaattttttcataaaattgaagatagtatggtaacggcttatgtaaatcaaaattgttcattgatatacctcgtttatttataatcatttatttcctaattataatacgcttgttaataagagtcataataattttgaatttttgaagagaatgagtatattcagaattttcttgatgaaagcgttctttttacgtataatcaaatagataataccagtcgacggtcgaccgataggttttttacataaaaagacgcagggggatttttgatgaaaacgttaaaaatagcgaacataccaggagatggagtaggaaaagaagttgtgccggaggcggttagggtccttcatacgattgcagatcttcacggggggttaaaatttgaatttacagaatttccttggagctgtgattattatttaaagtacggacagatgatgccggaagatgggctaaagcagcttcaacactttgacggaatttttttaggagccgtaggaaatttaaatcttgtgccagatcacgtgtcgctatggggtctgctcattaagattcgtcgagaatttcagcaggtaattaatattcgtccagccaagaggttaaaaggcattgcatctccactaatgaacccaaacgattttgatttaattgttgttcgtgaaaatagtgaaggagaatacagtgaagtaggaggccggatttatcaaggagaagatcaaatttctattcaaaatgcggttttttctcgaaaaggaacagaacgagcgatgcgctacgcatttgaattagcttctaaaagaaaagcaaaagttacaagcgcaactaagtcaaatggaattgttcattccatgccgttttgggacgaagtgtttcaagatgttgccaagagttatcctcatattgaaacagactcacagcacatcgatgcgctggcggcttttttcgttacaaatccaagtcgttttgatgtcattgtggcaagcaatttatttggagatattttaacagatatcggagctgctattatgggaagtattggcgttgctcctgctgcaaacattaatgtgaacggaaaatatccttcgatgtttgaaccggtacacgggtctgctcctgatattgtcggaaaaggaattgcaaacccaatcggacagatttggacggctaaaatgatgttggatcattttggtgaacaagaagtaggcagtcatttattagaggttatcgagcaagtgacagaatcgggcatcattacaccagatgttggaggcagcgcaactactagtgaagtaacggatcaaattatttctcatttaaagaagtgaaggttctaaaagaggctaggacaaaagaatattagacgaagtgaaaaacgaaccattgatcaaagtgtttgattcatggtttgtttttttttgtggtaaacgtaggtctcatgtgtgtaggtctttctagcagttggttggagggcaaggcgaagattcccgcgaaaagcgaagccttggacggaaatcaaaatcgataaatacatgttgacacttacatatatgaaccctataatagtttgagttgagataattcgtatacatattatttctagactatgatttagtttgttttaataaatagatacgaataaacaaataaaaggaggaaaatcatgcagaaatcgaaattatggacaaaagattttttagcggtctcattgaccagcttttttgtttttgtcattttttatatgttaactgtcacattgccgctgtttgcaacagatgaacttcatgcaagtaaacaaagcctagggctaattgtgacaatctttttagtgtccggtattgtgttcagaccgctagccggtaagtggatgacaacattaggacaaaagaaagtactattaataggtgtctttatctttttaattggttctattttatatatgaatattcactcattatctgcgctgctgctgctgcgtgtgcttcatggtattggttttggaatgagcacaactgctacaggagcaatcgttgcaaatgtaatcccagaacagagaaaaggagaagggatggggtactatgcgacgtttatgaacttagcgatggtagtaggtccgtttgtaggcttaacgttaacaaatactttgagtcatacagcggtctttaccgttgcggttgtatcttctgttttagcagtattatgcagtctagtacttcgtgtacctgatgtccaagcttcttctgcaacaaatgaaatacagccagccaaaggtcttgcggcgttttttgaataccgttcgctgcctatttctgttgctggccttgtggtagctttttcatatgcaagtgttatttcgtttgtgtctatgtatgcaaaagaaatgggctttacgcaagcctcaagctttttctttgttgtatacgcggtgtgcttattagcttctagaccttttactggaaaatggtttgatcaatacggagaaaacagcgtggtatatccgtccattttatctttagctatcggtatctttttacttagccaagcgacaacaagctgggtgtttttattagctggagcattgattggattaggctttggaacgattacatcaagttttcaatccattgctgtaaaaaaagcttctcctcatcgccgaggtgtcgccacagctacgttttttgtgttttttgactctggaatgggtttagggtcctttttattaggcattttatctacagcagccgggtataaaggaatgtatgtattctgttctgttgttgctcttttagctatagcagtataccttgtattgcacggtcgaaaaagccagaaacagcgcattatttctcaaaatgaatcattaggaaaataacataaataaaaaaaggcgtgctcaaggggagcatgccttttttatttatggagctctaaagaaaacgaaaacggctgtgagtatatcgatatagaagccctcctgatttctttagagatttcttttattccacttcttcttttgtaatccactcactggaccatgtctgaatttcctgaattaccggcgctagtgctaatcctttgtcggataatgaatactcgattcgaacaggagtttccggaataactgtacgaatgacgattccttcatgctctaattcttttaagcgctcggataagagccttccgcttactggaagtgcttcttgcatttgagaaaaccgctgtgagccggaaagtagctgaaaaatgatcaaactcgtccaacgtttcgttagtatagtaacagccttttcaaaacgtgggcagagtgctaaaccgtccatgttattacctccattctcttcctatattataaaacaaagtcagcattttatctagtgtnnnnnnnnnnnnnnnnnnnnnnnnnnnnnnnnnnnnnnnnnnnnnnnnnnnnnnnnnnnnnnnnnnnnnnnnnnnnnnnnnnnnnnnnnnnnnnnnnnnntttatattttgattatataatttatataattataaaagttaattactaaaagtaacaaaaagagcataaaagctttacaagataaatgtatcgtcatataatactttaagcaagtaaagtcacttacttttagtaagcagatacatcaattaaaaaagataaatgtagtgaattgctaaaaaaatggttgttcatgtgagagattgagcacaatgtgaaaatagtagataagtgaaagacacataagaggaggaaatgactgtgattaaccaaaaagttgtttcaattttaaaagataaaattaacgtagtaaaaaatgaagaccattttatttatatagtaggacctattacgcttcctgtgaatctggatggcgagacacaagtatttagttggtattcatggttgcgttctgataatgtaaaagaaggatctttaagtacggaagagcttattgaaaaaatgcaaggagctaatttagctgacatgcagcaatctagtgttcttgtgtacggagattttcaagaatcgcatgaggcactcattcgtatgcacagtatctgccatacgggagatatattcggaagcaaacgctgcgactgcggttttcaattaaaacaatcaatgaaaatgatcgtcgaaaatgggagcggagcgctattttatttagcaaatcatgagggacgcggcattggactattcagcaaagcaatggcatacgttcttcaagaaaacggatttgatacggtagaagcgaatgaagggttaggatttgaagatgatactcgcagctatagtgatgccatcagcgtgttaaaagtgctgcgccaaaaaccggttacgctgattaccaataatccgaaaaagctaatcgcgcttgagaaaaatggcgcacttttatcagggcgcgttccactttggggagatgtatcgcagtttaatgaaaagtatttggatactaaagttaaacgttcaggacatttaaaagaggaggttcttctttgatcaatcacgaattttatatgaatatagctttacaaaacgcaaaatcaacaaaaggacaaacagagccaaatccgcttgtaggatcggtcattgtaaacgataatcgaatcgttggaattggtacgcatttaaaagctggcgaaccgcacgctgaaattcacgcgctgcgaatggctggcgaacaagcaaaaggagcgactgcttacgtaacgctagagccttgttcacaccacggacgtacaggtccttgtgctgaagcgctagttgaagcgggtgtaaaaaaagtggtcatagcaactttagaccccaatcctttagtagcaggtaatggggtcgaaattttagaaaacgcaggcattgaggttataacaggtgtatgtgaagaagagtcacgtcaaatgaatgaggtcttcaataagtatattgtaacgaagaagccgtttgtttcattaaagtcagcgattacgttagacggtaaaatagcaactgcttcttctcacagcaagtggattacgtctgaggaagctcgtttggatgtacatcagctacgtcatgaaacagcgggtatcttagtaggggtgaatacggtcattaaggacaaccccgaactgacaactcgcattgaaggcggccgcagtccaattcgtattgtgatggattcaaagctgcgcatgccgcttgaatctaagctagcaacggattctttagctccaacgtggatatttacaagtcagggctattcaaaagaaaaaaaagaacaactcgaaaagcaaggcgtcgaagtatttgttacaagcggtgaggacaaagtaaatcttgaagatatgctttctatactaggtgagaaatttgtgtcgtctcttttaattgaaggagggggcgaagtgaatgccgcattcttggaaaatcgtttaattgataaattggtgctgtatatggctccaaagctttcaggaggaaaagaagctcctactttcctagaaggaaaaggcgtagagaaaatgtgggacgcagtggacgtggagcgtctttctgtgacgtcaatcggcaaagactttaaatttgttggatatcctgtttataaataaaaatgtgaatgagaatggaacaaaaatatgttagttgaaggaagatccgaacgatttatcgttcggattttttgctgttatggtgaacataggtttcatgtatgcaggtgcttttagcggtgtaacaagtgatctatattagcttattcatcctatttgttcatctgtagactggattgatttcgttatgtctcaatattatttttccacaggattttttagagaagagaaataatacactattttactcttatagattaatttgctattatagggaatggtcaatttcgaaacattgtataaatttttaacatgtttactgttgactatctaaataaaatcactatatgtttatagagagaatatattatgtgaaagtaagggtgagaaaagagatgagagagtatagaattgggagtgttatgagagaccttcgcaaaatggcagggttgacacaacaagaattatcaagagacatttgtacacaagcgcaaatcagcaaaattgaaaacggtgaagaatatccatcaagcattaccctctataaaatttctaagcgccttggcgtagatgttaactacttttttgatagtgtagaatcacctcgacttgattacgtagatgcggttcaatcattaattcgtcaatatattcgtcagagagattatgatgctattcataatatcattgtaaaagaaaaagaaagtccgctgtttcaaaatccgctgaacaagcaatttttaatgtggcacgaaggtatttgcgtgtattacattcatcataataaagaagatgcgctgtctaaaatgtaccaagcgatcgagcttactaagcaatcggcaacgttttataaagaaagagaaattgaaattttaaatagcattggaattattctttatgaagagaaagagtatgaacaggctctagatacatatcaaacagcactcaaaagcttaaatgagctgccccaaacaaaagacgaaaatataaaaattagaattttaaatgcacttgccaaaacgcttggagatatgagtaactatgatgaatcattaatatatagcaaccgaggaatcgatttgtgcattagtaatgaatcaatgtatttatttggagaacttcattaccaagcaggagagagtttgatcaaattaggtaaaattgaacaaggtaaagaatatatggaaaagtctatgaccattttcaccctgcaacgaaatgagcgattcgtcaagctagtagaaaaagaacttgaagctctatttgtttaaaatattcctatcattataatttttgagaaatttctatcaaaatggagaaaatccatggttttaaggtgataaatgctgatagaaaggaattcatctacttttatcctgtgatacactagagtcaaatcaaagaaagaggaggaaataattatgaaaaaagtattagtcggtatggcattagcgtttacattagtagcaggtgttgcttcagttggaacaagcgtggcaacaggagatttttcaacattaggtcttcctagccaacattaataagaaaaagccgtgctaagaagcacggctttttttattgtgttttacttgactgatctttgttgcgtttgtttccctttgaattatccccgcttgaaatttcttcacccatttctacaaggtggtgctgtgtttttggattactttgattagcgcttcctttgttattctttttagtcatcttcattctcctttaaaacgatggcaatgcatcgagattatttgttttgtcatggtcaggaatgctgcgaatatacgtaccgccgtctttccctacaaacgtactcacatgctcaacgtccccggcttctactttctttaacgctgcttcataggctaaaacgtctcctgaagccgtttggaattctaagaggtcaccgtctgcatttttacgtactgcaacgaaacgttctttcatacaaataaacaccttcctttacatctatatggttgctgaaatagtcgtttttattcattgtaaaaagtgataaggtaaagaaaagagtgcaaaggggataaaaaatgacaacatttaattggcatgatcaagctcaaggcgagtggaaccaaaaagtatcattttggaatagccgaagtgaagaaatgtggaaaaacggaagccggaaaacagtgattccattcattcaaaaacatcttaaaaaaggcgctttgctagcagacgtcggctgcggtgatgggtttgggacgtctcttctagccgcttctggatataaagcaatcggtcttgatttatcagaagaaatgattcaaaaagcatctcaactgcataaaagtgaaaatttgtcgttcgctcaagctgatattatgaagctcccgctgtcttctgaatcagtagaaggggttatggtaatcaacgccttggaatggacggagcacccgcgattagctctgaaggaattgcaccgagttgtaaaaacaggaggatatgcatgtgtaggtattcttggaccaactgctcagcctcgtaccaatagttttcaaagactatatggtgaagacgttatttgcaatacgatgatgccgtgggagtttgaacagcttgcaaaagaaaatggatgggaagtaatcgatggcgaaggtgtatataagcgaaatgttacagataagctgattggacagctcccaaatgaattaaagcaagccttaacgtttctatggctatttatgctcaagaaacaataaaaacagcacacctctccttatatgtagctgtacaaagggtacactacaaactggaggtgagtgacatgagtaaaattaaaaaagaccgctcaaaatcagagctaggttcaccaaatgtagaaggacaagggacgaccacttctgaacaaggtgttcaaagcagttcagctaacaaaaagcagaagcgttcataacaaaaataaaacgaatttgcagggagaacaacgagctccctgcaagttcgttctatttatggggtcagttttataaataagaaggtattgtgtgcaagattatagatagcttataataaaatctgagccaataattgtaattttatacaagcttggtttacagccgatgtaaagtggaggtgtaataaatggtaaataaaagatgtttaccggatactgcagcgtctcatgcaaagcctgatattagaaaggcgatactttgcatggggtggacggtttagtaatagacatcgcctaaccgcgcatatctcatttctaatatatacggctttgccccttattgtataagcaaaaccacataaggagctggcagaaatgacgtatgtaaaagcaacaaatattttacctgaagagctgattagtgaaattcaaaaatacattcaaggagaaaccatttatattccaaagccgcagaaggaaaaaagaaaatggggaacttgctctggtggaagaaagttgattgacgagcgaaacgaacggattaagaatttgtttgaaaaaggaacttcaattgaggaactagcccgtgaatactttttatcaaccgaaaccatcaaaaaaattgtatataaaaagcaacggtagaaatcaagcgctggcaactgaatgcccgcgcttttttaggtatagtttatttctgatttattttttacatttcataaaaggaattcgtacggtaaagtaaaaattagctaattaaatgaagaaggagtgaagaacgtggaagcgtttataagaaatgatcaatataattttatcaaaagccaaacgcaaattcttatcaatgggcatggaacagtaaacaattctgatgtgctgcaggctttaaaagctcttgcaaaagaaaaagtattaaatgtgtttgaggttcttagcgaggaacaggaagaattactgctgtcagttgctgaagttagaaataaggagcaagcagaggtgtttttagaaacaataaagccttacgtgattccatttaaatcttttacagaagctggcgtgaaaaagctgtttccaaaagtgaaaaagttaaaagttccttctgctgatagcattgatctaacgagcatttcctatgtcagctggatcgataaaggctcaaacagaaagtttatcgtagcgcaggagccgtatacccagaagttaaaaggcattcaaggaacgtttaaacctatcaaccagaaaggaatatgcacgctttgccacagctacgaggaagtcggtatgttcactgctgaaatcaaaggaactgttcaagggacatttacacaacgaggaaattatatttgtcaagatagcgaagcatgtaatcaaaatctgcttaccttagagcggcttcatgactttatattaaggctcagtaaataacatgcggctaataagaagaatacaaaaagagaaggttcagcctctatacttttggtgagactgagccttctttgtgctatcttgttttctcaatgggattgtcacgatagctaatccaatcgctccagctgccggcatataattttacatttggaaaacctgctgattttaaagctaaaacgttcgggcaagcagatacacccgatccgcagtatacaatgatttcagcatgagaatcaatagctgaaaacatttccttccactctttatctgttttccacaaaccttctgaagttaacacatcttgccagaaagaatgaatggcgcctgggatatgtcctgccacaaaatcaatgggttcttctaagccgagatatctccttttttcacgagagtcgatcagaataacattagggttatgaagattctcttttacgtattcaactcctgcaagtccccaatcttgttgaacgaaaggtacaaacgtttgaggagaagcttctggtacgttcttcgttgtttcatatcccgattgcttccagttattaaaacctccatttaaaatttttacgtcttcaattcctatatatcgcagtagccaccatgctcttgaagccatcattccgttttgttcatcataaacgacgacttttgaatcagcattaattcctaagctgccgagcttttgagctagcttttgaacgtcaggcagcgggtgtctgcctccgagagaagcagctgcagaagacaaatctttttctaaatccaaataatgagcatccgggaggtgctcattttgataagcgcttgcacctgcctcagaattcccaagggtaaatcggcagtcaagcaacacaatggagtgttggggttgctgtaatgcagtatgtaagtcaactggtgaaataatagtattcataacattcacatccttttaccaaaattctagttgaaataactaaaaatgaaaagcgttatatgtaaattacggcaaagctattttgttttccttcaattattccccgtagaataattaaccattttaacgcttatctggtgcagagcgaaatgctcctgtgctacagttataataagagttacatagtgtaagtcaaacgctcagcgtaatgttatacctactattgatgagaaggagagagaaagatgcaaacaaatgaaaagaaagaatttaaactgatcgcactagatatggatggaacgctgctgaacaatcagcaagaaatttctaaagaaaatcgtgaggccattgctaaagcccaagaacaaggtgttcatgtggtgctcagcacggggcgctcccttttaacatgccgtgaatatgcgcagtctcttcagctatcttcttacctgattacagtgaacggaagtgaaatttgggatgaatctggagagcttgtagaacgaaagttaattgatgcttcttccatcgagaagatgtggaatttaacgcaagagcataagcttaacttttgggcggtgactacggataaagtatggagagacgaatttccagaagatattgcctcacaggaatggctgaagtttggctacgatattccagatgatgctttacgagaagaagtgctgaaacaaatagcaggcatttcagattttgaaattagcaactctagtttaacgaatctagaaattaatgcacttggtattaataaagcaaaagggatcatgactgtatgtgaacgtttgggcattacaatggatgaagtcattgctatgggagacagcttaaatgatatggctatgattgaagcggcagggtgtggaatcgctatgggaaatgctcaggaagctgtaaaagaagcagcggactgggtgacagatacaaatgtcaataacggagtagcgaaggctatcagccactgggtgctgaaataacagcagctctccatgttgcacaactcaactgcttcccgcataaactgatactggatgcttcccttagagttcgtcttatacgtctatataaggagaagccatctagttaaggagtggggagtatgagtgatttatcattagacaagctgttacaaaaagcagaaaataagttgcaagatgtacatgaaatagtgcaagaaaaagcgtacgagctcattgggcaatcatataaagaaagcatatttgttagtatcactgaaggatttagatcgatagagcatcagcacaaactatattcacaaggccgaacaacaccaggaagtattgtgactaatgccaaaggcgggtattcttatcataactatggactagcttttgacattgcgctgcttgataacgacggaagagttgactggaccattgatcgaagatggaacaaagcgggagagataggaaaaaggattgggttggaatggggaggagattggacaagcttaaaagattaccctcattttcaatatacattcggtttatctttgtcggagcttcgaagtggaaaaggacctaaaaaacaggcgccaaaggcttcaagcatgttaattaaatacggagatcgaggaaatcacgtacagttaattcagcgtatgcttattcacttaggttattctctttttggaggcgcagacggtatattcgggtcttctactttcaaagcggtaaaagcttttcaacaagcactttatctgcaggtagatggaatagttggaccgaagacactcgaaaaactctacaataattttaataaaactatgttctaaataaccataaaaaaacgataacgagaaaaggaagaaaggagatggatggaaatcgtctcctttcttccttttctgtagttatagtagaaaaactgaaatttataaagaaataaaaaggattttctaagcgtaagaaacgttcacgtgatctaactggataacattgctcaacaacacgatatctttatatatttcactttttacagaggcgtttgaacagttttgatagtctttcaacaagcggccaagttctttaataaataacaacgtctcttgttcattaatcatagtcaaaactccttgtttagaaatgaatccaggtcattatataggaattctatcatatctatacgcacctgttgacaaaaaaagttcgtcaatttttttgtgagaagaagaaatttagggatatgtggaatgggttcgactctctcattttatctatatgcagcttgtctaaaaatatgagagtagttatagtaatatttactcctaatcatgcaacttaaaacctattttagaggttatccgtaaattccctctattgtagagcgatggaacaaaaaaagaatgcctctttttgtatctttagtacgataacgttttgaagaaataaggcatatttttgagtattaagatggatttgaattagatcttttgacacgctctttttgtaggagaggcatatttactttctatcaagggaaatcgtaaagctccaaagcgtttctaaatcagaaacgctttggagcttaattttttggataagggatgtgcaaaagttctgggacggtcacaaaatgatatccttcttgcttaagcctaggaatgatggtatcgagcgactttgcggtgttagaaaggtccatggtccaatggccgccgtcgtgcatcaaaacaattgttccggcgtgcatgttcttaaatacattattggtgatttccgcttctggaatttgcttccagtctaatgaatcagaagaccagttaatcgcatagacattttcatttggcagctcgttgatcatttcttgcgttaaatttccatatggaggacgaaacagctgtgtttcaaaaccggtaatgtttttaataatagcctgagttttggcaatttcccagtgaaacttttcagtagattcctttagtaaattggggtgccaataggtatgaatcccaacagcatgaccttcagctaccattcttttcaccagctcagggtgttcgtgagcttttgccccaataagaaaaaaggttgctttaataccatgctttttcaactgatccaatacatgtggagtgaagcgtggatccggtccatcatcaaatgttagggcggtttgctttagttggttattaccttgataaagcaaacggtcacgcacagctacattttttacttgttccgctttacatagtgcaggaagggctccattgaataaaaagcacagtgtaaaaagcagtatgctaattcttcgtatcatgtacatgcacgctcctttcgagggcaaagtataacgttatgatacccgattaaaaattttgtatgaagctgaatttcccttttgtgtcaaagcgtatgatatgcatgaaacagcgtactataataaacagttactattaggtgaagaaaggaaaaagcagatgaaaaaaataatgattgccgtagcattgattttttcgctaagtttatctcccttagctgaatatatttcctatcatgatgactataacgtaagtgcaaggtcgtaccgttcggggaagcggtcctttaatagacagccaagcattagacaaaatgagccgaggtctaatttttcaaaccgcagaaatggaactgtaaatcgaggatttacccgttcaaaacgaggaggattcgcccgtggactgctttatggcggcctggcagggatgttatttgggggtttgcttggtcatatgggtgcactgggcgggatttttgggttgttaattaacattttagctattgtgcttataattaatttaattctgcgtttattccgcccttctcgtcgcgacaataattggaggtagaccgtaattgctgtcataaactaacaagaaagctccatataaataagaaaacgctttctatagttaatcgaaaggatgaaacgtatgtcagcaaacagacagcgcagcaaatacctggcgttttgcacagaatgcggtctcccaaacaggttaacattgtttcttctaagacagtacgttgcgacagacgaatatagcggattttattgtgggaattgcggaattcgaaacgaatttccagattcggtcattgaatacattaaagaactttaaaaaaagctgggacaagaaaatccgaacgtgtttgattctccatcaagaatcaaacgcgttcggatttttttattggtagggtgaacgtaggctgtatgtaggtgcttctagctgttgattggagggtaaggtaaagacttctgcgggaaaagcggaagaggtgagaccctgaaggagcataagcggcgaggaggctcatcgcccgcccgcggaaagcgacgtcttgcaccgaaatcaacaggggtgaaacaagcgatccatattagaccatttatctcgtttgtttatttgtagatcgatttcgttatgtcttaatctctttatttatttgataaaactatgttctaaatgcaaaataaaaagaaaaacatagctgtgcacaaagatgactaaataagtttctttgttaaggataatcaataaattcctcccttcaggcttgctgattaggagcagtgcacaacgatctataagaagaatagatataatgaataactgtaagacctagctaacatttttgattgcagaaaatcggttgaaccatactttagaaggaagcatatactacattaaaattttagaaaacggaggaattgactaatgcctgtttccgtcattttcaaccaaataaatgtggtaagtatggtttccaattcagtaattgcttcgggtcaaaatagccagccagattggaattcccaaggtaaatttaacttaggaaacggattctctgtaaattcagctatattgggcagtacgaatatcattaatgatcaagatgtttgcgacactccaattactcagccggaaaatattaatcctcagccagtttctcaattctagggaaaaagaagatgaaagaagttgaaaaagttgattataaaatttactaatcttaatgttacgtatatttctactaattctggtattttcacgggggaaaatactcaatcagattggcaagtaaattggaaaagtaatacggggtttggtgaaataatcggctataataactttgcctctcaaattgtaaatatcattaacgataatgacgtcgttgattcctatttttctgaaaatatagatggatcggcgaaaatatattagtaagagatttaaaccatcttttatacagatggttttttgctagcttattttagggtgtaatcgtagctattaacatagactaaaaggtaatgacaggaatacttttatcgtaaacggagtaagtatcatagaaaagacgtaaaagctcacatgattaaagagacgttcaatttgaggcaaacagataagaatgtaaacataagataatgtattttcagttttatattgaatcagacgaagcaaacttctatctgtgaggggttgtctatgactaatattcactatcaatcgattaaagtaaataaaatccaaaacagttcaggcctattttacggcgttaatattcaatataaatggaatcataaaagtcaaatttctgacggtttcggaaaaatagttggtgattctaataaaattttaaataataccaccgtgacgaaaatttctaaaaagaatgatgactaaaagcgtagagtcaagcttccttttcagcctgctcaaaagaatcatttacatcatcttcaccaagaacaaggtgtgtgttataggatagttggttatcatctccggaaattgtgccgaaacctgaattactgctgatgatcgtagtttcccaattttgctgaacatttttccctataaaaactcctgcattgtttttaaccgcatttacggtgagatcatcaaaaacgatctgaggagaacgaagatgtattttcataattcctcccgatacatatgagacattaatagaagtcatctaatacactattatatgttgtagatgggctaaaggtgttaaatcaaataaggggtcaaactctatggatgaaaaggtgctgaatatactccaaaacattgaaaaaaggcttacagatttagaaaaaaacatgaatgaactttcaaaaaaaacggttcattcttttcatttagatatagagaacgttcaaacactaaacttggacgaactgtcttattatttagagcatattgatgtaaaggaacttagtggaacgttgaatattggcaatacttttccttcgcaaacgaatcaatatcaagtgccgggaaagaaaggtaaaaaaacaacaaatgaatctgatgtcaatcgaaaatcgggtagtcagaataataaagaaaagggtccttctgaaatatcagttaaaattaatgaaagaagtgtcccttatacgctaatccatacggaagaaatgagggagtctgatcaagctctagagtcaacttttagcataggtgacatccacattggcacaattgaagatgcttcagctgtgaattttggcaataactttccgacaaacttcagaagtcataaaaaagtgagtcaaggatttggcaatattttaggcaatcaaaatgacattcatgacatcttatcctctttggaagaaaaagatatatcagaagtgtacaatgaaaatcaagacggtaagccgcctgagtggctggacacaatgatagaagaacaaaagaaggaaatgggtgaaaccggcctaaatggagatgaaaagggagagtgaataggagggtaaaaactttgggttctaaggtaagtgttgttgatgcgaaacttctgaaagaaagctttaattgagaaaaaaagaaaagtgagtaataaaaaacctgctacttgtttggagtagcaggttttttagtttgtttctcagctgctgcagttttaacataaaaaagagcatgcgtaatttaattgaacaccgggacagatcggttctttcattcccacagataaggagtctcttggtaaacataatagttcaaccaattcataaacaataggttggcatgagagcgccaagtttttaaaggttttttgtcgggatcattgtttgggaaatagtgttccggaagctttggctctagtcctttttctgtatctcgaagaaattcttcctgcagtgtttgaacgtcgtactctgggtgccctgtaacgaaaacaaacttttcgtctttagacatcgccatatacacgcctgcttcttcagaataggaaagaagctcaaggccaggatgattttgtacttcattcatgtctacatcagtgtgacgggaatgaggagaataaaagacatcatcaaatcctcgcagcagcttaattggttcttcactcgatacaacatgtgtaaatacacccgtgcatttatcagaaagaggtcgcttgtcaatgccgaagtgatgataaagcccggcttgagctccccaacagatatgaagggtagaagtcacatttgttttacaccaatccataatttcttgaagttctttccagtagtttacttcttcaaatggtatatgttctacaggtgctcctgtaataatcattccgtcatattttcgttctttaatttgttcaaacgttttataaaactgatctaggtgatttttactcgttgtttttgctttatggcttgccgtgtaaagaagtgtaatatgcacttgcagcggtgagttcccgagtaaacgtaataattgcgtttcagctttttctttttccggcattaagtttaggataacaatattaagcgggcgaatttcttggttaaccgcgcgcacgtcgtccataatgaaaattctctctttttctaaaatttcttttgccggaagatcacgtggaatattaataggcaataaaattcctcctattcgatttcgaagtaatgacgcgtataaatgttctttctcacgtgaaaatgaggttcaacatttatgtacaatatactattataggaatatacagaatattaagcaattgaattttgaaaaaaagagcattaatatgcgtaatggctaaaatgaaatggtacaataaggttaaactggagtgttgctatgcttttttagcgtgactgaaactcattaaaatttatagcgcagtcgttcctgtatttagtaaacttcatatctcccccaaaaaacggattttatccttttttgatgaagtgtttaaaaagaattctcagcagaaaaggggttattatatgacaactaagaagcaaataaaaagtgatttgcaaattgcacaagaggcaacgattaaaccgattaaagagattgccgagcagctagatattttagagggcgagttagagccgtacggacattataaagcaaagctttctttgtccgttatggaacgtttacacacaaaacaagatggaaaagtgattttagttacagctattaatccaactccagcaggagaagggaagtcgacagtgacggttggcttagctcaggcattacatagattaggtaaaaaagcgattgtagccatgcgtgaaccatctcttggtccggtaatgggaattaaaggaggtgccgctggaggcggttatgctcaagtgcttccaatggaggatattaacttgcactttaccggagacctgcatgccatcacaacagctaacaatgcgctggcagctattttagataaccatatacatcaaggcaatgaattgcgtattgatacacgtaaaatcacgtggaaacgagtggtggatttaaacgaccgcgcgctgcgtcaggttgtcgttgggttaggtggtccgatgcaaggtgttcctcgagaagatggatttgatattacggttgcatcagaaattatggctattttctgcttagcgtcagatttacaagacttgaagcgtcgcttagcgtctattgtggtagcttataacatagacaatgagcctgtaacggttgcagacttaggtgcacaaggagcgcttactcttcttttaaaagatgcgattaaaccaaaccttgtacagacgttggaacatactccagccctcattcacggaggtccttttgctaatattgcccacggctgcaatagcgtcattgcaacaaaaatggctgcaaaactaggcgactatgtagtaacggaagcgggatttggggcagatttaggcgcagaaaaattcctaaatattaaagctcgtatggcagatattaaaccagaaacggtagtaatcgttgcgacaattcgcgctctgaaaatgcatggaggcgttcctaaagagcgtttaaatgaagaaaacattgaggctttagaagcgggaattgaaaatcttgaaaaacatattgaaacgattcaggcattcggcgttccttatgttgtagccgtgaaccgctttgtaacagattcaaaagatgaagtagaagcgcttatgaattggtgtgcttcaaagaatgttcccgttgctttaacagaagtatgggaaaaaggtggagaaggcggcgtcatgcttgctgaaaaaattcttgaagtcatgaacgagatagaaagtcagttttcgcctctttacgatgtgtcagcttcgattcaagaaaaagtagaagctattgctaaaaccgtctacggagcacaaggcgtagattttgctccaaaagcgttaaagcaaatacagcaatttgaagcaaacggatgggatcacctgccaatctgtatggccaaaacacagtattcgttaagtgatgatcagacgaagcttgggcgaccaactgattttaagattacggtgagggaattccgtccttcgctcggagctggctttctcgttgcgctaacaggttcaattatgacaatgcctggacttccaaaaaaacctgctgcgctcaatatggatattgacgagaatggacatgcactagggattttttaagagaagaggctagggtaagagtattttagttgaaggaaaatccgaacgatgaagcaagattcttgatgaagaatcaaactcgttcggattttttcatagttatggtaaaaataagtttcatgggtgtagtggcttctagatgtagattgggtggacttagtagtgtctcaatctcattcttgcaatataaaataacaggtattttatgaattaatttggcaagaaagaagaagagctgactgttcgcattttataaaaaaggaagtagttgaaatgtttgatccaattgtatttgataatttaaaagtggttgtagaaggagagatctatgatcttgacttatctgggcaagtatctgttacgaatcgcgaagattttgtagacttagctcaatttactcgaacgtaccgcatttcttttcaaccgcatttttgctgtaccgcgtccctaactttatcaaccgacttagacaacattcatgcggaattaacgccttcccgtgtagaaaaaccagggtgtacagtttatattcattttcagctaaaaaaacaaaaaccgtttgaagaagctgagtttcgaaatatacaggaaatgtgtgagaggatctggggaacaacaagagttgtgaagcagcgtattactcatgaagttggaggaagcgaatatgaaaacaatattgcggtaacctttaaccgatttatttacgaagatcaagtaggagatttaatcgagatgattgattatatgctgcaaacgactgatcagctaaaggttctttacgacaaatcataagagcgtttcagttgtacttcagaaatgaagtgaattacaataggaaaaaggaggcgttttgatgagcgtgtatgaatactctgcaaaaacaattaaagacgaagacgtatcgctatctaactatcaaggtgacgtgctgttgattgtgaatacagctagcaaatgcggcttcacccctcaatataaagatttgcaggcgctgtacgaagaagaaaaagaaaatggcctaacggttttaggttttccttgcaatcagttcggtggtcaagagccaggaagttcaaatgatattgaacaattttgtgagttaaactatggcgtttcgtttccgatgtttgcaaaagtagatgtaaaaggggagcacgcacacccgttatttacatacttagcagaacaagcaccgggcctgctaggttccaaagggataaaatggaattttacaaagtttttagtgaatcgtcaaggtgaagtcgtgaagcgatacgcacctcaaactgcaccaaaagatattcaaaaagatataaaagaattgctgtaaaagcaggtggatttccatctgttttttatttttcagcaaggattttcagagggtgcttagctgtcagtgagacgagcgccttactttgtgctaaaataatggtggatataattgaggtgagcaaatgaataaaatagcggaaacggaaaagtgggttcaagcaaagcttgcgaacgacacgacgggtcatgactggcagcatatcgatcgcgtgcgtcgaaatgcagtgcttttatataaaaaagaaggcggcaatcgggaagttatcgaactagctgcacttttacacgatgttgtagatgataagctagtggaagatgttgaaaaggcgtacgaagaagtgtgggagtggctgaagagtcatcaggtagaagaagagaactgcaagcatatcgttcacattttacaaacgatgtcatttaaaggcggaaaccgtccggctatggctacgcttgagggtcaaattgttcaagatgcagatcgtttagatgcgatcggtgcaattggtatcgcacgtacgtttatgtatgcaggtgctaaaggcacggctttgtatgatgaaaacattgctgtacgaagtgagatgacggaagaagaatacagacacgggaaatcaacggctattgcacatttttatgaaaagttattaaagctcactgcgttaatgaatactcaaacagcacggtctctagcgcaagagcgacatacatatatgaaagaatttttagttcaatttaagaaagagtggaattatcattatgaaaatgctgactgttgaaaacttaacaaaaacatatggagaaaaagagctgtttcatcagctaacatttacaattacggaaaatgagcgaatcggcttaatcggtgtaaacggaacaggaaaatcgacgcttcttaaaattatcgcaggtctagagctcggagacgaaggagatattgttcatgctaaagactacagcgtgacctatttacctcagcatcctgattttgatgaggacttaacggttttggagcaagttttcagcggagatacgcctcttcttaacttactaaaaaactatgagctagctctgtatgcgttagagcaagattctgcaaacgagaaaaaccagcaaacgttgtacgatttacagcagaaaatggatgcgatgaacgcgtgggaagctaattctaacgcacagtcgatcttaacgaagctgggaatttcaaatatgagtgcaaaaatcggtgagctttcaggtggacagaaaaagcgcgtgtcaattgcgcaaagcctaattcaaacacctgatttattaattttagatgagccgactaaccacttggattatgagacggttaaatggatcgaagaatatttatccaaatatcaaggagccgtattgcttgttactcatgatcgctatttcttggatgctgttacaaaccgaattttcgagttagacggtgggaatttatatagctataaaggaaactatgctgcttttctagaaggaaaagcgattcgagaagagcaggaaaaggcaactcaagcaaaattaagcaacttatatcgcaatgaattggcttggattcgccgaggagcaaaagcgcgtacgactaagcaaaaagcgcgtattcaacgatttgatgaattagaggggaagctcgattcttctgaaaaagaatcactggatttaagtttagcaggcagccgccttgggaaaaaagtgtttgaattaaaagatgtgtctaagacgtatgaaaataaaatcattctttcagactttacgcacattgtgaaaaaacaagaccggattggaattgtcggaaaaaatggaagcggaaagtctacacttttgaatatgattgcagggcgaattgagccggatagcggtgaaattgacagaggacaaacggttaaagttgcttactatacccaagaaagcgacgatatggacttaaatcaacgcatgcttgattatattaaagaatcggcagaagttgtgcatacgacggatgggaaaatgatctctgcgtcgcaaatgctcgagagatttctatttccttcacatacgcacggaacaccaattcaaaagttgtccggaggagagcgccgtcgtttatacttattgaaattattaatgacatcgccaaatgttttgcttctagatgagccgactaatgatttggatactcaaacgctaacggtgcttgaagactacctcgaagaatttccaggtgtcgttatcaccgtatcacatgatcgctatttcttggataaagtagcagattacttactagtttttgaaggagaaggaaacatttcgatttattttggcgcttatacggatcaattggaagaagcgatgaagaagaaacaggcaatagttcagcaggctaaagtgaaagaagaaaagccaaaacagccggagaaaacgaaaaagcgtcgcttaacgtataaagaacaaaaagaatgggaagaaatcgaaggtaatattgcagcaaaagaagaagaaattgaacgcttaacaagtgaaattgaacaggtgggcagtgattatacaaaagcgcataacctatcgttagaacaagaaaaagcaaatgaagaattaagtacactgcttgatcgctgggcagagctttcagagctgattgaagaaattgaaaacgcgtaaacaagtcgttagactgagtataagccacatgctacaattttaatgagaggagtacgatacgacatgaacattaaatcaattgagccaacgccaagtccgaatacaatgaaaattaatttagacgaagtgttatcaggcggaaaaagcaataactatacggaaaagaatgctgaagcggccccggaagttgttcaagatattttaaaagtagaaggggtaaaaggagtctaccacgtagcggacttcttagcagtagagcgaaatgccaaatatgattggaagcaaattttgccgcaagttcgtgcagcgtttggtgaagatttgcaaagtaacagtgaacaacacaaaatgaatgagcattttggtgaagtcaatgtgtccgttcaaatgttcaaaaacgtaccgatgcaagtcaaattaacggacggaaatgaagaaaagcgttttggcctgcccgaacgattcgcaaaagcggtagcagagcttcaaagcttttcagataatgtagtgttagaacggaaatggaaagaacaaggcgttcgttacggagagttagcggctatcggagacgaagtagtcgaagaattagcagcagcatatcctcaagaaagattaactcgccttgtagccaatgcacaagaagaaaaagaaggcggaaaagttgtacagccgcgtaaaacctataaagttacagaagagatgctagaagacaaagattggtcagtgcgctatgctcatttagaacaaatggatccgacagaagctgatttagacgttttaaataaagcgcttgatgatgaaaaagcatctattcgccgcttagctaccgtctatttaggaatgattgaatcaaaaacggtactaccttatttatacaaagcattaaaagataaatcagtcactgtgcgccgtactgctggagactgcatgtcagatttaggctttgaagaaggtattccggcaatgtgtgaagctcttagtgataaaaacaagcttgtgcgctggcgtgcagctatgtatttatacgaagtaggggacgagacagctcttcctgcattaaaagcagcagagaatgataaagaatttgaggtagacttacaaatcaagctagcgatcgaacgtatcgaaggcggagaagaagcaaaaggttctgtttggaaacaaatgacagaaagcagaaaagcataaaaaagatcattcacttgaatgatctttttttatgactgctttgcagtagcagttggaaactgcataggctgcatggtgttatcaattttaataggctgatagccggactgttttaagtaagtcaaaatagtcggcagagactgtgcagtaaaggatttgtcatgaaataaaatgacgggtgttcttccattggagttaaccccttgaatatgaggttcaaggccctgaataattctaggtgcagaacgaagtgcccagtcttcactgtctacattccagtcccataatttaaagtggcttagcaactctgtacggtgtggctcttttaaataaggaacgctgccgtaaggaacgcggattaacttactgtcaacaccggttactttcttaactgttgcttgacactcctgcatttcttttagcgcagcgccgtctttactatacatgacatgaatatcatgggagacgccgtgacagccgatggcatgaccttcttgtgctacttttttagcaatttcagggtgagcgtcaatttgatgctttaacataaagaaagttgcttttacgttatattgacgcaaagcatctaaaatatgaagagtatcaggtgttggaccatcgtcaaacgtaagataaacaggctgtgtaagagcttgattttgatcgttcaccgtatttcctacatacatattatggtgaagtgtattaagcagcttctcaggctgtgctgaagatgcagcttctttcagcggcaatgcagtagatgctaagacttgctgagatgaagcagattcacttcctttggcttctgtaataaaaaacaaagaagcgacaatcactaacactaaagacagaaatgcataaaatcgtttgtttggcttaaatcgttggttcggtttaaatcgctggttcaatttgaaaatcctttctactaaactactatttactactatagtacaaaaaatggaatattaatagtaaaaatcgacatttttatggaaaaaacttagatgatatgacccggttttgatctttttttgtcaaatgaaaaaggagaacgggacaacgatgaggatttgaagagtgagtagctagatttttcctggtttttatagtatgcttttagcgtgaatgattgttaggaggaatgttaatatgtcaatggcatatgaagaatatatgcgtcagttagttaaaccaatgcgtcaagaattaactcaagctggttatgaagaattaacaacagaagaagcagtagttgattttatggaaaatgttgaaggaacaacttttgttgtcgttaattcagtttgtgggtgtgctgctggtttagcacgtcctgcagcgacacaagcgtatttacagtctgagcaaaaaccaaatcaagtggtaacagtttttgccggtcaagataaggaagcaacagctaaaatgcgtgaatattttggggacattgagccttcatcaccgtctatggcgcttttaaaaggaaaagaagtcgttcattttattcctcgacacgaaattgaaggtcagccgttagaagttatttttgaaaacattttaaatggttttaagcagcactgttcataaaatgtcctgcttttgtcacatctagtatatagatttttagagaaaaatcgcatatactttataagaaaaaggatgtctatagacatcctttttctttatgtaaatagccaaagagtgtagggggagttatgaaagtgattgttacgactgctggtcgaacaaatgaacagatgattgtaaaagccaaacaagtagccactgatttaagtataccttttgtaacaagagagaagaaatccgttgcagatcttcagaatcttcaagctgcagacgtgctggttgtcggtaagaatagagtagaattgcatgtccaaaatgaagaggagcctattttttttcatccaaattccgctatgtttagagtgaagagatggctgcgaggagaacgtgatccgtttattgaagctgctagtttggaaaaaggaatgagcgtgcttgactgtacacttggtcttgcatcggatagtatgatggcgagcgcagcggtagggaaaagcggaaaagttgtcggactagaaggcaaccgctatgtagcttatttagtcaaacaaggactcttaaattgggaaagtgacgtacaagagttgaatgatgcaatgaagcgtataaacgtggttcatcaaaattttgaatcgtttttggcgtgttgtgaagataattcttttgatgttgtctactttgatcctatgtttcaagagcaaattgaggaatcgaatggaattaacggtattaaagcaatagcactgtataccacgctgacgcccatggctatacaagaagcaaaaagagtagccaaacaaaaggtcgtgctaaaagatcattggaaaagcagtcgttttgaagagcatggatttaccgtgcaaaaacgaaaaacatcaaaatttcattacgggacaattgatatacaaaaataaacaaaaaagtaaaaagaatcacgctcattgaaaagacttccaaaaccttttaggaattaaaaagttttggaagttttttttgtgaatttcatctaaagttcataaaagtatgatatatttttgaacataaaaatacttttgtgtttaagcatccagcaaaaaaggaatatcttgtataggtttccgctcggtgtgacaacctcaaacagaagaaggaaggtgctaactaaaaagtcgtcgaatgcccgtagacagcataaatgaataagcaaatataggtaaaaaattaataagtatgttacaatacctagtgagttatgacaatgaattttacgatatgaaaagaccatatgggaaaagatgagaaaggaaagatacgaatgcctagatggataaaaagaatgctagttgtatttattacagtatttacatttgggcttgtcactccaccagaatatttatacgttgatgatgcaaaagcggacaagcaacataaagcagggtatgtaagagaaacaactcctgtcacagctgttatagaagatattcatttgccatatgaagaaccaaaatatgaagacgtttcatcatttgttacgtatgcaatggaatcagctgaaaaacagtcagtggaaaaattcggaacaaaaattggacctgtcattgaagatgaatttcgtcaagcagtgttacctaaaattgaagaagtgctgaccgacattggcactgaacgtgaacagtcaattcagaatctcgagataagcgagcatcctgctgctggctacggtgaaaagattttccatgtatatgaccgggaaaccggtcaggacttaatacgatttcatgtacggcgtgaaaatcctccaaaagatggatactggtttaattttcactatcatgcggctgcagataattttcagaagcattatgatttagggaaaatttattggaaccgaaacatgccgcctaaatggtttagctgataatagacacaacattctgcgatttcgaaatgttagcttttttaagctagcatttttttacgtctaaaaccgttagggtctaaataagctgaaacattagcacaacgataaaaaaatcgtttataatgaagtcagacttcttaccatagaatagtgagaaggaacgaatagatgctggaggtaacacaatgaaacaatttacggaagaaaaacaatttcgcgaacaaattaagaacgaaacactaagcgttgggatttttacgacaacgtggtgtcctgattgcaaacgtttggatatgttcattgatgaaatcgttgatgaaaatacagataaagcatggtttaaaattgacaaggatgagtttgaagaactttctgctgaaaacaatgtaatgggtattccttctcttcttgtatataaaaacggtgaaaaaattgcacacttgcacagtgcaaatgctaaaacgcctgaagcggtccgtgaatttttagcaactctttaattccttaagctgcgagagcattcttgcagcttttttttgtgagaatggctatttccatttttccatgagtggggtatactaggacaagtgaataatcgtaaagcaataaggtctcaatttaaagattgagtgaaaagggaagtctggtgaaaaaccagcgcggtcccgccactgtaagcgctttgtgcgtaagtcaggagacctgccttattgttagctgtgaaaccttcgaggaagggtgaagcagggtaatgaacatacatatcaagtatagtgaacggattcttttcctgcttatcttgacgttacctgctttgctttcaattgaaagtaaagcttttttattttgaagctgccggcgagcagtatacatagtcaaagcggaaaaacgggatagcgctgctttttgcatgatcatttgctttttctttaacgtggaggtttcgtattcacaatgaacaatatatagggggagtatttagatgaaaaaatggctttcgtattccattattgcactgttagtcatcgtacttgctgcatgcggtgcaggcagccaaagcaacagtgataaaaaaacgaagcaagatacggcacaaacgtcacaagctgcatttccagtgaaggtaaaagacgcgcgtgataaagaaattacgttgaaaaaacagcctaagaaaattgtttccttaatgccaagtaatacggaaattgtatatgcccttggccttgaaaaagaattagtcggtgttacaagcaacgatgattatcctaaaagcgtaaagaaaaaagcgcaggtaggagatatgaacgttaatgcggaaaaagttattgctttaaatcctgatttagtgctagcacacgcttcaagtatgggcgtttcggatgaagtatttaaacaaattgaaagtgcgggtattccggtatttgttgtaaaagattcaacaacgtttgacacggtttatgattctattacgcaaatcggtaaattaacaggtaaaacaaaagaagctaatcaaacaattaaagacatgaaagaaaaagtagcttcaattgagaaaaaagcaaaaacgatttcaaaagaagatcgtaaaaaagtatggatagaggtatcaggagctcctgagatttatacaacaggaaaaggtacgttcatgaacgaaatgcttactatgatcggtgctgataacgtagcggctagtgaaaagggttgggttaagttttctgaagagcaagttgttaagttaaaccctgacgttattatcgcaacgtatgatgcagataaaaatgagattatgaagcgtcccgcttggagcagcatgactgctgtaaaagagggtaacatcgagaaggttgatcaaaacaaaatcaaccgcttaggacctcgtattgtagatggcttagaggacttagcaaaagcagtataccctgaggtgtacaataaataagaagagggaccatattccagttcgaattgaaaaggggattggtcccttttcacatcttaaaattgaagaacggcctgagcttttaatcatgaaaaccgagacttcttataaaacatacagctcaggggttttaggaacaggcattacggaaacggacaccttttacaatcgatttgttcacaaagactattattcagatactccttctttggagtatgagcaatatttgatgaaagaaaatgtgcgccatgagcaaatcgtagggttaatgacagccgtttggttaaaagaaagagcgatttactgttatgaaggctacggagtaagagtagcttccgtgataacggctggagtaggaaacgcagtagatattacagctgacgaagctgtcccgttctattcttctcccggtacaattaatatgttttttttcgtggaaggtacgcttacggatgcagcgtttttacagctttttattgcggccacagaagctaaaacaaaaacgctgtcacagctgggtgtcatagatccggctacaaagacgattgctacggggacatctacggacagcatctcagttgcagcgtctcagcaaggaccattatatgaatatgcaggctctatgaccgctttagggcaagcggtagccaagctggtgaaaataagcttagagcagggacttaagggaaagaggtgaagaaatgagtattacacaagcgataattgcacacatgacggccatgacgattgctttactaattgaccgaattataggcgatcccgaaaattggccgcatcccgttcgctggtttggcaaatggatttattggatagattctagattaaataaaggtgcaggaagacgatttaaaggattgcttcttgtgataagtatggctgtgctcgcaggagttgttccctttttgttcctccatgctttgtacggagttcattttatagcaggtgttttagtagagggcgtaatgattgcgactactatatccactcgttctttaagcgaagctgcctataaggtacaaaagccgcttcagctaggagatatggagaaagctagatatgaagtaagtatgattgtgggacgagatacagatcgtttgtcagaaggagaaattgccagagcgacggtagagaccgtggctgaaaatacaagtgatggtattacagctccgcttttttatgcatttataggaggaggagccctagcctttttttaccgagctattaacacatgtgattcgatggttgggtacaaaaatgaccgctactttctgttcggctactttagtgcaaaaaccgatgacgtattaaactatattccaagtcggttaactgcagtggtgatgacggctgttaatgtagcaaaaagccagtattctcttgggcatgtaacgagtttgattaagcgtgatgctaagaagcatcccagcccaaatagcggatacggggaaagcgcagtggctgctctgttaggtattcaactcggcgggcttaatacatataaaggcatagaatctaatcgtgcaaaaatgggtgaaccactcattcctctgcaagccggtcatattgaacaagctgttttcattatgaaaaggacggtctatgctacgtggttattatatcttttgttaggaggagttattagtgctattacctacacatggagctaatcctaatgtctttttaaaagcaataggggctgagaatttgtcgcatataaaagactttagcgtgaatacaaatcctttaggggctccccttgtgcttcacgaaaagtggaacgaattcaagggtgcagcgtttagttatcctgaccctcaagtaacggagctgaaaaataaacttgcagctcatcatcatgtttcagctgctcaagtgctgcctacaaatggcgccgctgaagcgtttttccttattgcttcgttattttcaggagagaaagcagggattgtacagccgactttcgttgaatatgaacaggcaagtaaagcttatggatgtgaagtgacatacgttcctttagctgaagaaaatggctggagctgggatatagagttgattatgagtattcttccggacataaaagtactgtggatttgtcatccaaataatccaacgggcgttatgtatagtcatgaggaatggatgaaagtagtaaaagctgctgctcatcatggtacatacttaatgattgatgaggcatttattgattttgtcgaacatcagccttcatttgattctcttattctggattatgagcatatcattgttgtgcgttccatgacaaagatgtttaatattgccggggttcgtcttggctatattttggcaaatgaaaaaatcattagcaagatggctaaaaagcagcctccttggagtgtaaatggattgtcgcagcaaataggcatgatatgtgtggatgaaaaagattttgtaaaagaaaccgtacattatattaaacaagaacgggaacggaccttgagtgaactaaaggaatgggggcttttggtttctccttctcaaacaaactattatctttgcagcgttccgtcttctattaaaacgcgcgaatggcttgtctatttagcaagccatggcgtggtagctcgtcatactgaaaactttccatttttaaatggacgctatatccgtttggctgtgaaaacgaaagaagaaaatgactatttacttaacgtaatcaaacaaggacttgatgaaatatgatcatctttattagcggaggcgttcgaagcggaaaatcaagtgcagcggagaacatggttcaaactttttgtacaaagcgcactgtttatattgccacaagcaggcaaacagataaggaaatgcaaaaacgcatccagcttcatcaaaaagaacgccaagcagcgaacacgccttgggtaacgatcgagcagtctgtagatttacaacaaattctgccaaatcttcaaagtgatgatgctatacttttggattgtgtcacgaactggcttgccaatgagctttttttaacagaaaaaaggtggcaaacaaaagaagggaaacaagcggtttttcgtcatatgacagaaacgctcgataagctgtttgcgcagtctcagacggttgtgctagtatctaatgaactgtttgaagcgggcgtattagaagagcccacatatagctatatgaagatattagggaaattacatcagtatattgtagaaaaagcagatgtggctatttgtgtagaagcgggaatctatcgttttaaaaaaggaaaggaatgtgtagatatatgaaagaatggatagccatactacggatttctctccagttttttacgatcttaccactagctaaaactgttcaatggactgaaaaaagaacggcacgctcactttttgtactgccttggattggtatgttactaggcttgatgttttatagctttttacagctgcttcaatcttcacctatcactacgattgttgatagtattttagttttgcttttaccgcttgttttaacgggtggccttcatttagacggctggatggacgtaagcgatgcgtatttttctcatcagtcaaagggaaaaaaactgcagattttaagtgatccgcacgttgggtcttttgctattctttctcttatggttctgctgctgctgcgttttagtgcgatctatgaattagtgtctctttcttctttatcaatttgggcatgcttaattgtctttacccttccaagaattggagcagccttttcgttgatgagagataagcccgctaaagatacgggtctggctgcttattttcaacaaggagtcaccaaacggtctatttacggatttatcatcatgagcctattcttagttgctattttcgttatttttatggacaataaattcattattcttttctttgccggttttttatggctctggatacgattttatcgttcgcagtttggtggcgtaacaggagatgttataggggcaaccattgaaggaggagaaacatttttatggataattctttggttatcacatgtattcgtcacggcatgacgcttgaaaatcaacagaaaaaatatatagggtggagtgatccgcctttaagtatagaagggaaaaatgaattgaaagagctttttctagaacctcagctcgttatttccagtgacttaaaaagggcgctagaaacaagtgcagttgtttttccaaaatctcaggtggttaaaaataaaaattggcgtgagctgcattttggagattgggaagagaagacgtatgaagatttaaaaaacatacgggcgtatagaaattggattgatcactggacagaacatacgcctccgaatggtgaaagcttctcaaacttttcaaaccgagtttgggcagcgtgggaagaagcggtcgatttggcggccagtcagcaattgcgtcacattgctattgtgtcgcatggcggcccactgcgtttacttgcatcccattttaaacagacagcgtcgctttgggatgtttctttttcttatggagaaggtttttcagtagcgtgtacatacaaacaggcaaaggagagaagagcatgcatttcgtattcggcggtgcatttaccggcaaaagaaaatgggtgaagcagcattatgccagtgagtcggtaaaatggcattatttgtatgaagaccctgttttaccagtgcttgagttcgaagaaagttacatagtgctagaaggatttgagcactatgttaaggaattaatacatagcgagttggagtctccgcaccttgttgttaaaaagttaatacagaagtggagagacagcggtgtatgggaaaagttaatagtgattggaactgaagtcggcaaagggattgttcctttagatccaacagagcggcagtggagagatgaatgcgggtatgcgtatcagcatttagcggcacatgcccggaaagtagatcacatttggtacggaattgctaatcgattgaaggaggaaatacaatgaacatttacacaaaaacaggggacaaagggcagacaagcttaattggaggacgagtaaataaagatgatattcgagtggaagcatacggtacgattgatgagctaaatggctttgtaggtcaagcgatttatcagctggatgaaacaacattaaaagatgtaaaagaagagctaattacgattcaacatgagctatttgactgtggaagtgatttagcatttgcaaaagatgatcatccgtacaaagtaacaaacgacatgatatcagtacttgaaaagcgcattgatgtctatatgtcagaagcgccggccattgagcgttttattttacctggaggcacacctgcagcgacaacgcttcacatttgccggacgattacacgccgcgcagaacggcttgttgttggcgtgcagcgtgagtataaaattaatgcggcggtgcttcagtatttaaatcgtttatccgattacttctttgctgcggctcgaatcgctaacgcgcgagaaaatgtacaagatgtagagtatattcgcagtgccaaagtattcaaacagcctaaaaaataaggtataaaaaacggtcgagctaaaagcgatcgtttttttatgagctatttcgataggcaaaataaaactataaaaaagaggtaaatgcatctataatgataagagacagagagataaagaaaagaggttgagaaatgaatcaagattctaagcgagcaggtattgtttatacagccagcgcttacgttatgtgggggctttttccgctttactggaagcttcttggcgaggtgaatgcgaatgaaatactcgctcaccgtgtcatatggtcatttgtttttatgcttttacttttgcttgtgacaaagcaaatgagtgctttaaagaagacgcttggtttattatttcgtaatacgaaacaagcggtcattttatttgtggcttcagtgctgatcagcatcaactggttcgtttacatttgggcggttaaccataatcatattattgaaacaagtttaggttactacatcaacccgctcgttagtattttacttggtatagtcgttttaaaagagaagcttaatttttggcagggtgcttctgttggattagctgctataggtgttatcgttatgacagttacatacgggcatatcccatgggtatcattaagcttagcgtttagctttggtttgtacggacttgtaaaaaagactattcaattagaagcaaaagtaggattaacgattgaaacgatgatggttgcacctattgcggttatttattttatttttcttttagtgaaaggatcttcaagtttttctcttcagtcgcttgatctgagtgctcttttaattggaggcggtgttgctacagctatgccactactatatttcgctaagggggcccctcttattccgctatcgatggtcggttttttacagtacattgctcctaccatgacgcttttattaggggtattcgtgtatcatgaaccgttttctagcgtagagatgattgcctttttgttcatttggagcggatcggttatgttcattttatctaaaacgaagttcatgagttctcatcagccgaaattctttaaagggcgctcagcttaacggacaaaaaagcggatatctttagatatgcgcttttttgtttgccgtaaagaaataaaaacggagacgggaaagtcaccgtatgtatactttatagcttccgcttgaaatgagcgttcaactgaccttgaagcatttggttttttacttctttcatttttctcgcttcatcttttttggccaattctgtgcgtatttcactcgtttgaactccttcttctatgcgatcggcaatatccattaatcgttcgacgtctgaaaacgaatatttccggatacccgtattggttcggtccggaaagagcaggcttcttttctcgtagtagcgaatttgtctttctgataaaccggttaattcttttacaatcccaatagacatgacttttttatctcgatatgacgcttcattcgtagacaatctccctcacccctgagtacgtagtagtatgttattattataaaggaaaaaaatacaaaaaattataacatgtaatatattctaacatatatatgttatattattgaattattatgtgagaaaaagtgacataaataatgaaatagggaaaagagtcctataaactaatgattaactcgatcccaagtggttaaccatacaggataaagccttgtggttaatcacttgctttcaaaatgatgaatagaaaataaatgtgagaatatacataaattctaaaaggaaagggcgttttaaatggctgtgcaacaattgaaaaaagaagagattattgagctggcaaaagaaattattgaacttgatttgaaaagagatgaaaaatttgaagagttgacagagttagccggaaatcgtgcatatgaaattttgcgcagagtacaaaatgcctgtttataagtaataaaaaaatcccgctctaggcgggatttttaattggactgctgttcaagattaaataattcttgtttcatcttagtgtggtcgaggttttcccctataaagacaagagtggtgggcagcttcatcatttctttcatatatagaggcatgccgtatgaatattgaaacgaatacgtatcatccgaatgagtaaagcgcatatagcctttaatacgatagatggtatctggcatttggcgcagccaattttcaaataattcaagatccacgttttttgtaaactcatatacaaatgttttcaaatgaagatgatcttcaacatgagccttatggtgcggctgtttttgagacagctgagctctttgaatcaggtcaagcttcacgcgggaaaatgtcgttaataatgttattgcacgagcgttaattgattgaacctcaaaaagcagggaagacttttctgcctcagacagcatgtccgttttatttaataaaattacatccccatgttttacttgttcttgaagaagtttttgaagttgaatgcttaaggacccacgttctttccaccttgttgcatcgagtgtggtgataatacttttaatcgtgacttgatgcgcaaaaagtggagacatacaggcatccaacacttcaatgggatgtgcaactccggttgtctctatatagatagcatccaatgtgttctcctgtagaagtgaatgaagctgagtttcaaattgaccttgaatagtacagcacacgcagccgtttagcaattcttttaacggcgtgtctttttctacttcatttgagtcaatcgaaacttggccaagctcattcatcacaacagcaatggtgcgattacgatctttttcttgctgaagcagctgtttaagcaacgttgtttttccgctgcctaaaaatccagataaaatgtagatttctgttttcatttcagtctctcctatgtaaataacattgtttaaatcgaaacttttccgattgcggattggtaaatagtatatccaagaggggataaatgtttaagcgtaaatttttatgctttttttgtattcattataacaactttaaaagcactatggctatcttttgtaaaaaactcaaaatacaatgaaataagaatattataaaatttcaaactagctgtgctacaataaaagaaaaagaaaaaggggagcaaaagttatgcgaatattagttttaggcgcaggcggcgttggaggttactttggaggcaggctcgtggaaaaaggagaggatgtgacttttcttgtcagagatcgcagaaaaaaagagctggaacaaaatggacttgttatcaagagcatacacggtgacttcacttcacctgtacaagctattacaaaatctgaggtgaaagagccttatgatgttattttgttcacaactaaggcttatcatcttaaacaagcaattgaggatgtgcgtccttttgtagggaatcagacagttgtcgtacctttgttaaatggtatggctcacgtgggtcctttacaagaagcatttggggaagaaaaagtcattggaggactgtgctttattgaaacaactttaaacaaagatggagaggtcgtccagacgagtcctgctcacagacttgtattcggtgaatttaagcagaaggaaacagaaagattacaactgattgagcaagcgttcagtggtacaaaagcttcgtttgtaaaaagttcatatattgaacaggatatgtggcataagtatttatttattacggttatgtcaggcatgaccactcttatgcgcgcacctgttggcccagtgctagcggcaaaaggagggcgtcaattcgtacaagagctttttaaagaagttgaaaatattatgatggcatacgatgcaccattagctgaagggattattgaacagcatatgaatacgatggacaaaatgacgtatgacatgaagtcatcgatgcagcgtgatatggaaaaaagttttcaaattgaaggagaccaccttcaaggatatttgctgacattagctgaaaaatcgtctatacacgtaccgcttcttcaaactgtgtatacgcatctaaaagtgtatgaagaaatgttaaaaggttatcaaaaataatgacagcgaaaattgatttagcagtcatgcaggtactgcagaagctgctaagtacagcagaaataggacaaattccttccgctcccggcatttattttttctttgataaaccgggcaggcttttgtatatcggagcaacgacgggctctctattagaaagagtaagagctcacgttgcaggaaaaggcgttagcaacacaaaaaaattccacaaagaaatttgtgctgttggatatattgaagtgcatggattaaaaaaagaattagatatgctgagaacgatgcttgtaaatggttattttccaaaatacaataaacaagatgtaaaaagagaaaatgaatacgacatttacaccgttcacggcagggtccttggagatacaggagttgataagaaaaaagtctccaagcgaaaaacggtgctaaagccaacgttaaaagagatagagattcgtcaagaaaacagtgatattacatatgcacgagtcgcaaatatgaatgctgaagatcgagtgaaaaagttgtggtcttgtcaagaagcaggagcgcagctacatcttcccgagtcgaaagtgttagcaataagtgaccggctcttaaaagagcagtatacatttcagcgggatatgaaaaagaatatgatgtttacgatgcgggatttagttgttattcaagtgttgttaaatttaaatccgacccatgatttgaaaaaacgagaaataaaggaagccatcagtttagtacgtaaatttggcatagaagaagctcttcgcatctctgaaaaattactcaaaacgtaataaaatccatgatcattgtgatcatggattttatcatttatcattcacacttaagctaattcgtcaataacttttggtagagccataatggaaataacgcaaagtgaactgacaacttgatgcatttcaaaaatggcaatgatgaataacatcagtgatatatataattgaaggccttttaatccccacggcttgcgatcgaaaaaaaagtcgctaagtacaaatacaaagaaaatgagcgaactgaacaaaataatcatggatgtagacatggaacgatcataagcaatgataaataacaaagcgagaagcgacacaacagatataacttttaatgttttaatcatcgtgtttttattcacttttttcaccttcatttgtaggattgatctttcatcctcattttataggatagtcaaaagttctaaaagccaaacgaataaatcataacaacaatttaacatctttatactacatttacattgagagaaaaaaatgggcgtgttttgagctttgtgcgcttcattgacgcgtgcaaagaacaagtgctatagtatgtttgctctaaaagctaaaggagcaaagttttcaaaggacgtgactatgtgaacgaaacactattagtaattgatggatttaatttattaagccgctgttattttgctacttcttatggcagagatgaagcagcgttgacaagaaatagtaagggccaatttacgaatgccctcagagtaacgattcaaaaaatgcatgcattgattcaccaatatgagccaagccatattttcgtcgcttgggatgttaagcgtgaggatacaaaacgtaaagatacatacgccctatataagcaaacaagagcagagctgcctgagccgctgattcagcagtatgaaacgttaaaacaattttttgacacagtaggcatttatcaaatgtcattgtcttcttatgaagcagatgatttaattggagcacttgtaagcaagtggagtaaggaaaagcaaagtccagggtacatctatagcaatgaccgagacttgcttcagctcctagatcaacatatttcgcaaattattgccaaaaagcaggttggcgatcttgtttatggcttcaagcactttcaagaagaatataatattcatcctcgtcaatgggtggacgtaaaagcattgcttggtgacaaatcggacaatattccgggtgttcctggtgtaggagaaaaagccgcactgcctcttattcaacaatatggctctatccatgaaatttatgcacaaattgaacaattagatccagcttttaatcgttacaaaaaaaagctgaccgaaggaaaagaactaggtatgcttagtcgtgaacttgctgagattattatagacattcaagaaatcagtatgttaaattgggaagaattaacatttatgtatgattatgaacgatggaataaagaaattcaaactctagaactaaacattaggattcgctcatgatttttagtacaatacaatttatgaacatgagaaaggagtaacaagcgtgcaaccaattcataaagaaacagtccaaaaaaaaatacaaacatttttaaataaagacgtatatgtacaccttgaaacgacaaacggtgcatatgcttcacacgtaaatgaaaaagtaatgacagttggggcttttattcgcaatggtaaagtcactatttcaaacggaaagataactggagaaggtccttatcgtgtaggtcttcaaattgatttaggatggatttatgcagagggattaacagattgggaaattgatgaagaaggccgacttcttctagctgggcatgactttgaaggtcgtttagcagttgcccttcaattaagtgaacatccgttttcataagagaaaagagaggagaatagaatatggaagaaagattattaattgtatttccgcatcctgacgatgaagcatatggagcagcaggaatgatcacgcaagctagacaaaaaggaacgcccgttacatatgcctgtgttacgctaggtgaaatgggacgaaatatgggtagaccgctgtttgctaaccgtgaaactttacctcaaatccgaaaaaaagaacttttagatttagcgaacgttttagatattcaagacttgcgtatgctagggcttcgtgataaaacgctggaatttcttgatattgatgtttttgcagataaaattgaagaaatcattaacgatgtaaagccgactcacattttaacacattaccctggctttgcggtacaccctgatcataatgctacgggtgcagctacaattcaagcggtaaaacgtatgccaaaagaaaagcgtccggttgtttggtgtcatgcgttttcgaaagatcgtattgaacatattggagaaccagatgttatttttgatgtaacagcgatgaaagataaaaaaattgaagcgttaaaagcccatcgttctcaaacagaaggaatgatgaacgcaattgacttcgatcgcttatctgactatccgcaaatggaacgtttattaactagagaagaattctggacatataactgggagtaacagatgaaaaaacagcgaattttatttattggagcaggacgaatggctgaagctgtagcggctggtttggttacgagcagcgctgacagtattgaggcagtggtgatgtcaaacaacggagatattgagcggttacagcgtgttgaaacaacgtacggcgtacacacgacgcaaaattggtgccaagaagttgacaattcggatgttattattttagcgatgcctcccgaggcccatccttccgtgctcaaggaactttcgactcatttaaatcaacaatttgtcgtaacgttagcggcagggattggtccgagttacttagaaagtcatcttccgcaggatacgcctgtcgcttggattatgccaaatacagctgctatgattagacaatcgatgtcactatatacacttggaacttctgccacaaaagagcataaagaagtgcttcaaatgattttaaaaggaattggtaaagcgcatgagtgttcagagaaagaagtacatgagctaacggctgtaactggcagtgcaccggcgtttttatattattttgcagaatcgttaattgatgcaactactgcttacggtgtggacgaaaaaacagccaaagatttagttattcaaatgatgtatggctctgtacaaatgctgcatgaaaccaaagatcctgcgtctttaagagagcaagtaacaactccaggcggcgctactgccgaagggttaaaagtgatgaaagaacaagacttttccctaataataaagcaggcaattgaagcaacgaataaaaaagcaatgggtggaagctaaaaaagctcgtacaaccatatgttagctgaaaaatccgaactatagttcagcattctttcattggaatgttgaatcagttcggattttttaatgaatagacttccttaacacacatatattcctctttggaactgttttttctctatgccccaaacttttttagtcatcaacaaaccgctttttcatatcagaagttgggagcatgcagtgctgctgtttgccaaaccacttatatcggttgcgagcgatccagttgtatactatatctcgaataggtgcaggaatgataatgaaagcatataaaaatttaacgggtccatctaagcgcttggcgatttttaaagcagccgttgactttacatatctttggtttccatgaatatatacaatgctgtctaattgctcaggaagtaagccgtgagaggctagctgctgctttccgaaatctgattgaagagaagcgaaagaaaacaaagcttgttcatcatgtttaataatatattgaacactgctattacataaattacatataccatcaaaaagaattaaatgtttcatcggacgatttcgctcctattccatacaaaaagtataattacttgtcatttttgaaaaataaaggtacgtttaaaagatatgaaagtgatccaaattcaaaggtaattcgattatataataaggactcataagagttaaaggagaagggtatgaaagagcaaaacgacgttgtcttatacaatagaataaaagaacgagacaaaaaagcccttgaactgctgtatgacaagtatgagcgaattctttattcgtttatataccggttaacaaatagctctgatattgctgaagaagctgttcaagaagtgtttattaagctgtggagaggaaagggagtttacagcgatgaaaaagggaagttttcatcatggctgtttacgattacaagaaacaccgcgattgatattgtaagaaaaagaaaaaacgatcctattttctcagaagaaatttttgattttattgaagatgattatcctcagattgacgagcagcttcagtggaaagaagaacagcagagagtacggcacgctgtatcaaaattgtctgaagaccaaaaaaagattattcaatccgtttattttaagggattaacgcagcaaaaagtagcagaagagcagcaaatcccattaggaacagtaaagggtagggtgcgattagcgttgcggaaattaaaaacatatttaggtactgatgcagaagggagagctgattcatgagtatgtgcaataaactaattgattactataatgatcagttgacttcccatgagaaaaaagagtttgaaatgcacttaaaaaactgtcaaagctgtcaagaagaactaagagagctagaggaagttcttggagatctaacgtatttgacaccagaacaatctcctccgccagaaatgaaacagcgaatacttgcgaatgtattcgaagaagaacaaggcgagacaaagagggaaccaatcgctttaaaaaatgaaaaacaacatgctgcgtctaagaaatcaaataaaaagtccatcattattggattagctgcggcacttcttttatctcttgcaggaaacagctactttctgttgaaagatggagacaaaggcaaacaagagccaaatgtttcggttgctcctcaaaacgaacctcttacatctgaaaaaacaataaagctgcaggcagagccgaacgtttctggcgaagcaacagcatctcttacgaaaaagggtggaaatctaaatgtggttattcaagcgaataacttgaaaaacgtaaaggggaatgaagtctatcaggtgtggctcataaaaggtgataagcctcatccggcaggtgcttttgtaacagataaaaatggaaacgggacagtggtctatacgatgagccaaaaagaacagactgaaaagtgggatgttatggcaattactttagaaccgaacgcgaataataagacgccaaaaggaaacattgtgttaagttcagcgctctaacaaaaacccttctgctaacagaagggtttttgttacgtgcagttaatcatcttcaaattgtatagcaatggtttgatcattttctatcttattcagtcgaatttccaataatccatttttgtacttagcgcgaactggttcgtctgtgtagtgaaaaggaagtttgaccgtgcgagaaaatacgcctgtatggcgctcgttgagctttaacttttgtttagatgcttcataagcataaggaacgtttccttcaactgttaatatatttgcgtccaacttgatttgaatgtcgttagttgaatgcagtccaggaacctcaacgacaataatgccttctttatcagtttcatataagtcgacgtttggaaatcgtttgggcaagatgtgatttaaatcgctccaaaagtgatttccaagcatatcttctaccttatgctgaatcgaaccccaatcaatctcttcatattttttactcaaaggaaaccctccttatattcacgtaaattccttctatatatatgaaaaaaagaaaattcaatgcctgcttacaaaaaatgagaaaaacacgtaaataagtgaaaaaatgtgagaaaaaaaagagattttgagtgaaaaagaaggattatgtagaataaaaaaagtataattacgtatagagctttctattatcctgaatgaaagcaagtatgtgaaggaggaagttgagatgagagaaaagcgtacatccagtggttttctattaaaacaacgtgctttcttaaaattatatatgattacaatgacggagcaagagcgtctgtatggccttcggttattagatgtgttgagagatgaatttcgcccttttgggttcaaacctaatcattctgaggtatacaaagctcttcatgacttgattgaagacggtgtcctcaaacaggtgaagcgtaaaaaagaaggaatgaagcttcaagaagtggtttattatacatttacaaatgagggagaagagaaagctaaattatataaaaaacaattaaaagtagagctggagcggtgtgaagctatgattcaaaaagctattcgtgacaacttcgggtccaaatgaacgtgtctttagttagaaaagacacgttttttctatagctgattttgtcgtcttatgtcggaataaaagttataaaatgggtacaaagtagtgtaaaagatggatatatagttatattatggataaaatacacacttttaacatatatggatgaattcgattttaaagattatgcactattcataaatagtgtacgaattgatatgatacaaagtgtatataaatctatttaatacgtgtatataaatctatttaatacgttatttgccatattttaagaacttataaaccgttatcagaccatcattcaagcattttggttttagcaactctgacgaatttgactagatttgtatcgagaagatattatttgtttactatgaaaggaatggattttatgaagtctacaggaattgtaagaaaagtagatgaattgggtcgcgtagtaattcctattgaattgcgccgcattttaaatatcaacacaggtgatccagtagaaatatatgttgatgaagatattattattttacaaaagtatagcccgtatggtgcttgcttagtaactggggaaattacgcgtgaaaacttaacctttgggaatggaaacgttgtgttaagtaaaaaaggtgcggaacagcttttacaagagttagagcgtaccttaaataaataagaagttttaggccttagtataaggaagagtatcaatccatttttaaactaaaaaagaacgttcttttgagaacgttctttttttgattaagccgttcgagaagatttattctcctctagcagctgctttttttgtatttttatcaaacgatacgcaagtcctgttgctcctgcagcaagccccgcaattagtccaatccaatagccaaacgcctgcaaatcggtgtattttgctaaaacaatgcctaaaggtagaccaattacccaataagataccaaggacattaaaaaggtaacatttacatccttatatcctcgtagagcgccttgaataggagcttgaagagcatcagaaagctgaaagaaaattgcataaatcaaaaaatgagaagttaatgcgagtacctctgcatcttttgtatacaaagaagctactgattctcgcagagtaaataaaagacctgcgcaaacaaaagccatgccaacagcgatagttacaccgatcctgctatagcttcgtgcatcttgatgacgcttagcacctgcttcaaatcccacaacaatcgttaaagccatagaaatactcagcggaatcatatagagaaatgaggcaaaattaatagctgcttggtgagaagcgatcgtaatggtattatatgagctcataaacagcgtgacggctgaaaaaatacttgtttcgaaaaagaccgaaaaaccgataggtaaaccaatttttaatatttctttccaagtaggaaaagagatacgatgaaatcttttaaataaatcgaagttagaaaaaggttcttttttatgaataattacaatggatacaatgagtatgcaccaatacgtaacggcagttgcataaccagagcctactccacccaagtgggggaagcccagcttaccgaagattaatacatagtttaaagctacattaaccggaagccctaaaatggtgataagcatagacgtacgagtttgccctaaagcatcaataaagtttcgtaaaaccgtataaataaaaagcggaataataccaaaagataaagcaattaaatactgtttggcaatgcgcattacgtttgcttctaaattcatcccttttaaaataggatcaacaacaaaaaagccgattaaaataataacaacggccattaaaatggagacataaagcccttgaatgacggagaacggaacttttttcttttgattagctccgacaagctgtgcaacaattggcgtaatagacattaaaattccgcttagccctgtaaaaacaggtacccataagcttgaaccaattgctacccctgccaagtcatctgcacttacccttcctgacatcatcgtatcaaaaaaagtcattgaaaacattccaaactgggtgaccaatatcggaaataaaataaaaacgaactgcttaactttttgagacgttgaaaacgtttgttgcattaaaaaacccccaatttgaaaacatttacaccaaaaagcattatatcacgccgtggcttgtttttgctaaggcttctgacaataaattcaaagaatgtatccataaaacgcggtgatttaaaaggagtaaaaaggtaaaacagtatatgattttaattttgacatgcagtgagctatgatagaaagtatagtaattatcatttaacgtggagggatacgtgtggatttacagttgcaaagtaaaaatgtacttattaccggcgggtcaaaaggaattgggaaggctattgctgctttgtttattcaagaaggagcaaacgttggaattgcggcaagaggagaggaagcgttacaggatgcacagtcagaattagaaaacgtgcgtacatatacagcagacctaacaaacgaatcagacagagttgcattaattgagaagttcattaacgatttcggaagcattgatattttaattaataacgctggaggaagtaatggaagcaccgccatggaaacagatttatcccttttcaaagaagcaatggagcttaactacttttcagctgtccacttgagcaagctagcagcggcgcgtatgacaaaagatgcggcaatcgttaatgttacgtctattttcggaagagaaagtggagggaaagtcacgtacaataacgcaaaatcagcacttatcagctttacaaagtcgtttgcagatgaaatgatttctaaaggaattcgtgtaaatggagtagcgccgggaagcattttgcatgaaacgggtaattggaaaaaaagaatggatgaaaatccggaaaagattaaacaatttgttgaaaacgaaataccagcagggcgctttggagagccggaagaagtggcaaacgccgttgcctttttagcatcttctaaagcttcatggatagttggtgcgacgttaaacgtggacggtggacagtcaaaaatgaacttttaacaaaagtgcaggaatttcctgcactttttcattatccaatatctttttgcatacgaggaatctgaaaatcttcattaattgcgtccgctgtaagctgaccagataatgtcaccattggcacgccgcctccagggtgtgtagagccgcctacaaaataaaggttagaaagaagctgacttcttgccggaattttaaaacctccatttttcttacggtcagttgctacaccataaatggacccgccgttagaaccgtaaagctcctggatatcgttaggagtaaacgtatattcaaactcaatgcttgaacgtaagtcttctaatcccattgcctcaagctttttcaatacgacatcacggtagcggtcttttaatgcagcccagtcgtctccttcttttaaaggaggtacatgagtaagaacgaacaggttttcttttccttcaggagcttgcgtagggtctgatttagacgatacgccaatgtaaattgtcggatccatggctacttgacctttgttaaagattgtatcaaactcttctttctgatcctttgagaagaagaaattatgatgttgaagctgcttgtactgtttgttaacccctaataaaagaacaaggccagaaacagtaggttcaaattttgcaagctgctgagtttgcttagctgcttgcgcatgattttttaataaatagcggtaagttggaattgcttctagattagatagcacaatatctgctgatagattctcgccattttctagtgcaattccagttgcctttgctccgcttgttgtgatttcttttaccggcgtatttagatgtacagtgacgccgagttcttgaaggagcttatccatcgcttcagcaattttgtacattccgccttttacgtaataaatacctaatcctagctgaacatgagcaagctgtgttaatacagctggtgcatgataaggagaagaaccgatgtacataattaaaaaattaaacaattgacgcaaatgtttgtttgaaaaatatttgcgtgtagtagcatccatagatctcattggatccatttgaagcagttcttttaccgtgtgcatcgttcgtaaatcgtgaagtccagataaactttttttataaaaactttttaagttcgattcatacattttatttgcataagataaatagtcaaaaaaaccttcaatgtcttctggagcaagttcttgaagctgctgaagcatgcgaggaaggtcactggtcaaatcaatttgtgttccatcttggaaaaaagttctccactgaggctcaattcgttctattgttaagtagtcgtggatattgcggcctgcactgtcaaacagctgctctagcacccacggcattgttaaaatagaaggtcccgtatcgaaagaaaatcctttgccgctgcgaatatttaacttaccgccaattcgcttgcttttttcaacgactgttacatcatatccatcagctgacagacgaatagcagctgacagaccacctaaacctgcgcctacaacaattactttcttattcatctttttcctccttataaaacaaaagcgagttgtcaacaatgtgtataaaatgacttcacgcaaaataaaaataggtctacaactttttattttgtccagttcgctaattttcatacgtgaaggaaaggagaaaaggatgtcttttttactggttgctcttgtcttgacagctacgcttgtcatcactatccctacatttaaacgtgtaaaaataggaagaaacgatatgtcatgtttgtccattattattccagctagaaatgaagaaagaaaccttacctttttattgcagtcactccagttacggaacgctgactttgaagtgattgttgtagatgacaactcaacagataatactgagagggtagccaaagcatttggcgtaaaagtagtgcaaccgggcgcacttccagctgggtggctaggaaagtcatgggcatgctggaatggagcacgagaagcaaaaggctcggtgcttttgtttttagatgctgatattacagtagagaacgacggaattgaaaaagtgtttttctattatcaacagcaagggggtgtgctatcggttcatccttatcaccttgttaagaggccttatgaaatgttttctgctttatttcactatgttacgtttgcatcgattggcgcgtttcatccctttaaaaattggaaaagtccttctgtcggtttcgggcagtgcttgctttgcagcgcagcctcctactttcaaagcggaggccacgaagggataaaaaaagaagtggttgaaaatatggcgctagttgagaaaatgaacaaacaaggtgaatttattacgtgtatgagcggacagggagctctttccatgcgcatgtatccaaatggtatgaaaggccttataagagggtggagtaaaagttttgcttcaggtgcggggaaaacggaagccatttatttatttctagtaagcttgtggcttactagcatgattaattatatcctttttttacctactctatggaatcaacatgcaggcttggcaattagcagctatgtttgctatgtaagcctcttatttaatagcttaagaaaaataggttcgtttacttttttttctttgtgcttatttcctattcatgtactgttttttctgggtctattcgtatggtctttcgtccaaacggcggtgagaaagcaagttaaatggaaagaacgcagcatatctatagaagaagaaaaaaagaagaaagtgataaaatgacaggtgctcagctcttaattaatatcatggcatggtttgtgattcacatgttgatcgcctacagatgcacaaaaatttctgccttttatttaaagaaggaccttgcgctgtttaaggttcaaagctgggaaacagttgggatatataaaaaattcggggtgcaccgatggaaaacgtggcttcctgatgcaggaaagctatttaaacgaggattttataaaaagaaatgggagagtagaacgaaggaatatgcacagctttttttaattgaaacaaatcgagcagagttaactcactggatcagcatacttccttctattcttttttttatatggaactctccttctataggtgtttggatggttatttatgcgattgtcgcaaacgtaccgtttattttggttcaacgatataatcgaatacgaattcatcaagtcgttttgaaactcaaatgaaattaattcacgtgcctttggctacgagtaggggcctcggtttttatttttttctccttattcgaagacaacaacctcttggataaaagaaaaaaagaagcaaaggcgatataaatactaaaaaagactaaaaatccccataaacctgctatggcatcatcaaattccatattgccccgggtggtaattccttgctgaatttcaatggcaaaaactaagacaagcataacggtaagggtatagataaaagaaatagctgtaatactaaatttccactttgacaataatttaaagatcatataaacgcttaaaaacgtgagcagtccaataataccaataatccagaagtgaagttctttatctgaaagagaaaatcctagtaaataaaaaatataaattaatccgtcgtgcaatacattaataatatttgtaatgaaaacaatacactctttcattttttctcctttataaaaatgtaagacgtttaaacttctaggtatacaagcatgcatagcccatactcattccaattttatataaaaaatgcactttctagatcagacgttaaagagatctgaaatttcaaataannnnnnnnnnnnnnnnnnnnnnnnnnnnnnnnnnnnnnnnnnnnnnnnnnnnnnnnnnnnnnnnnnnnnnnnnnnnnnnnnnnnnnnnnnnnnnnnnnnntatgtatagtggacaaaataaaaaataaatataaaatagtgaaacttaaagagaagctgtccgtattaaatagtgagaagaaaaaaagcataggaaacatttgtgtttgaaagcctatatagctgggaataagaaagtagttattttctcacgtttggtgaaaattatacgtagcggtgttgacaattttttttaaagagttaaaatgtgaaagaacagattagctctcttatattttttgtaagggagatttctttttacatttactataaaaataaaagtgagcttaaatttcaatagagacagaggtgggaatatgaaacagctcatgacaaacggtaaaaatattttttcgaaacagctgccgttatttctaattgcagttttgttgttttggattaaaacgtataccgtttatcgtatcgaatttaacttagggctagataattttatgcaaaagtttttacttttcataaacccaattggttcggcaattttcttttttgccattgcactactatttaaagggcgcggaaaagtacgagcactgcttggaatgaattttttactttcattcatcctgtacgcaaatgtagtatactatcgcttctttaatgattttattactgttcctgtattgactcagtcaaacaactttggtcaattaggtggcagtgccatggctttaattagcccaactgatattttatacttcacagatttctttattcttttagttttagtactatggaaaaaagttgacttaccagcaacaattagtcgacgtactgtgacaggtgtatttttatcagggattttattcttaagtgccaacatcgcactagcggaaatggatcgtcctcaactattaacaagaacatttgaccgcaactatttagtgaaatatttaggaacgtataactatacgatctatgacatcatccagagctcgaaatcttcagcacagcgcgcgctagcagatagcagtgatgtggctgaggtagagaactatgcaaaagcaacatatgctgagccgaacaaagaatatttcggtcaagcaaaaggcaaaaacgtcatctatatttcattagagtcacttcagtcatttatgattggttataagttaaatggtgaagaagtaacaccattcttaaattcactattaaaagatcagaacacaatgtatttcgataacttcttccatcaaacagggcaaggtaaaacgtcagatgctgaattcatgatggagaactcattattcggcttacctcaaggttctgtatttacaacaaaagcaaataacacctatcagtcgctatctggtattctagatcagcaaggctatacaacatctgtgttccacggaaatggaaaatcgttctggaaccgtgatgaaatgtataaatcaatgggtgtagaaaaattctttgattcagcttattacaatatgtcagacgaagatacgctgaactatggtttaaaagataaaccattctttaaagaatcaatgccgtacctaaaaggcttaaagcagccatttagcgcgaagttcattacgttatcaaaccacttcccttatccgctagataaggaagaccaaacgattggacctcacaatacgggagataagtcagttgaccaatacttccaaacggctcgttatttagatgaatcaattaagcaattctttgaggatttacaggcctctggtttagcagacaatacgatggttgtgatgtacggtgaccattacggtatttctgaaaaccataagcgtgcaatgggcaaagtaatgggtaaaaacatcaatgattttgaacaagctcagctgcagcgcgtaccattatttattacttcaccaggccttaaaggcggcgtaaatcatacgtatggcggagacgtagatgttcgtccaacagtgatgcatttattaggtcttgatacaaaagactatattgactttggtacagacttattatcaaaagaacatcagcaagttgtacctttccgtaacggtgactttgttacacctaaggtaacaaaagttgatcagaaagtgtatgacaacgcaacgggcaagcagctttcagataaggaagcgaaacagtatgataagtatgatgaactagttaagaaaaagctagaactatcagataaacttgtttacggagatttactccgctttcatacaccagaagggttcaaaccaattgaacgctcgaagtatgattacaacaagcgcgaagatcaataaaaaacaggcagcttttaatagctgcctgtttttttggtttatgaaacctttaaaggttttatccgtatataaattataatagtaatcgttttaagacacgggaagacaatggtataatatgtatacgtttaaaagttcggtcacatttgagataggagtgaaagcgatgaaagtcgttcgaatcataaaaaagattcttgccatttgggcaacaggagcagtagccgttccggtcagctattttggatttagtaccacgatgattcaatcccttggcattagtataggagtaatggtcgtgatgagcctgttttttattatgagcagtgctcgacgtcattatcaaaatccgtatagagaagaaattgcatacgttcgccatcaagtaaaagaggcaaaaaagcaattaagaaccattggaagctatcgttttaaaattcggtctgttcatatgtggacagaactttctaaactatacaaagtaggtaaaagcatcattgaaatggtagaaaaagagcccgcacgatataaagatgttcagcccttttttacgaactacttacaatcaacggttaccgtcattgaaaggtatatgtttttattatcaaaaccaacgaaaagcatagaagtaaaagaaagtcttcatgaagcggaagacatgctgcgcgggttatcagggaagtatgagcatttattaacaaatgccctttcacaagataagctgacattagatgtagagcttaaagtgctaaaacaagcatttgaagaagagcagccgtatataccgacagctactaatcgcacaaagtaacgtaaatgcaaaggatggggattttatgatgaaagaatataatcaaaatcaatcgttagatgcgctgcttgatgatccttttgcgtcgcctaccccgcagatacaatcggactctcgcgctgcaaaaagaaacacatacgatgatttgacgccggaatatcaggaaaaagcacagaaaatcgcaaatcaaattgattataaaaatcagcaggctatcttacagtacggggtagcagctcagtcagaactatctcagttttctcaatctgtactacagcatgtacaaacgaaagatacgggaccagtaggagacgttataggagatttaatgagtaagattcgccaagtgaatcccgatgatttttctgcaaagaaaaaaggagtcatcggtcgattattttcaggagtctctaggcctattcaaaatttattaacaaaatatcaaagcattaatgttgaaattgataaaattgcagataagttagagcgctcaaaacaaatgctgtatcgagacattacgatgctagatagcttatatgataaaaataaacagttttacgaggcgcttaacgtctacattgcagcggccgaatacaagttagtggcgctgcagaatgaaacgctgccccagcttcagcaaacagcatctcaaaaaaatgactacttgatggctcaggaggtcaatgatttaaatcaatttatcaataggctagaaaaacgagtgcatgatttaaaactgagccgtcaaattgccattcaaagtgcaccgcagattcgattaattcaagaagtcaatcagactcttgtggaaaaaattcaaagctctattttaacagctattccactttggaaaaatcaagtagtaatcgcaaccactttattacgccaaaagaaagcaatggaagcccaaaagcaagtatctaagacaacaaacgacttgcttactaaaaattcagagctgctcaagcagaacatgattgaagtagctcgtgaaaacgaggcggggattgtcgatatcgaaacattgaaaaaaacgcagtccgatttgattaccacgttagaagaagtgctaaagatacaagaagaaggacgtacgaagcgtaccgaggcagaatcagagctgtatcaaatggaaaaagatttaaaaactaaactattagatatgaaataaagaaaaagtcggtttacacactttgtaaaccgactttttctctgttttatgcattttgaagcgttctcgccatttctaaaaatggagttaaatctctttcagatttaggagcaaagatcgttaaccggaaagtagggtgttgattttgctttcgaacgagaaaaccgtatgcgttacttttatcatctgatgctttatacgcagctgctatctctaagttatgatgaatgaggtgtgtatcaagggaagccacttctgaaaagccagctcttaaaatttcttttgtttctttattgatctcctttacacttttatttggtggaaacacttcaatccgcatccacaaagcatcattttttttgttgtaaatgacatctcttcgtggctcttcttctgtaaactcgtatccttctagtacgtaaagcgtatagttttgattggtgcttcttttaagataacccgcatctgttctgctgcttcctttgtaaggataggtgaacttttgctgtggcaggcgttcttttggaatttcttcttgtgtgttaataagctcttcacgaaaagcagttgagcagccactcatcaaacatataaagcaaacaagaaatatcttttttttcatagctggcttccttatctattttcattcatgcatttttactgagttaacaattgaaattaactttttttcatcatcagaatttttagctgtaaccatcgtgatttttaaagcagggtgcccctttgtttctctcagtacatacagctttgccgtttcttttttactccctgatgtagatgcaaacacaacaggttgaataaatagggatgtagaagaaatttttaacgattttccaaactggtcatcaaacaattcttttgaacgatcaagatatgatttacttgtactttctttcccggaaaggacttcaattcgcatccacgtatagggagtcttggttgaaaaaagaatatcttttccatcctcttctttttgaagcgtatattcaccgggcaatgaaagagaatatccttgttcgcttacggtgagttgctgatgtttctcgttgctttcactgactgctttaacagaaggcagtataaccatggttgtgcttatcattaacagaaaagctaaataaaattttcgcatgtatatatctcctattcaaaacgctagacagcgtgtagttactataaaaaaatgttttcgccatgttagaacccgtaggtttatttttgactttttggtaaagctaaaaacacaatcaattagtaatggagagaagactatgaaaaaccgtaaatcaacttctgcagctaatcgccgtcaacagcgcgtgtgtttgggtgatgaacgattatttgcagttggtatcaaagcgtttattgacaatacgcatgaatcacacctagacaaaaaaggaggtcattgagtgaaatggtgcttgtcaattattattattgtttccattaatttctatggtattcaggcggatgctgcaaagaagagcagattttattatgaaaaaaaaggagatatcgtgtgggaagttcccatgaaagacgaaaagttgattgcgcttacatttgatgatggaccagatcctaaatatacgccgaccattttgaatttattgcaaaagtacggtgccaaagcaactttttttgtagtgggcgatcgaataacgtcttttcccaagcttgctcaaagagaagttcgtgaaggtcatgaacttgctaatcatacatatagccatttgaaagtaaggggccaggaagtagagagaattgaacaagaaattgaaaaagcggatgaacgtatacaagctattacaggaataaaaccttacctgtttcgcccacctactggctattatgacgatcgggtagtaaaagctgctaaaaatcagcagtataccattattctttggtcttggcatcaagatacatttgattggagaaatccaggcgtaggtaaaattgtaagtcaagtgcttaaccatgccaggtcaggagatattgtattgtttcatgatacgggaggagatcgaacccaaaccattgaagcattaaaacaaattttaccgaagttaaaggaagaggggtataaatttgtaacggtctcagaacttttaaaacatcaccctaattataaatctctttatttgatgcagcagcaaaaacagcactccgttcaataatcgggtgctgtttttctcgtaaagactttaaccaattttttaactggtttttccttctctttcgtccccatcagacgtatttttttggaaaaatgcttttacttcatctcgttttttcttcgaaataagaatatataatgtatcacctgcaaaaatttgtgtacttcctctaggtgtaagtaatttatcatctcgaataacagcagtcactaaaatgtcttcagggaggtgaagttcttcaagcgattttcctgatatatctgcatgttccacgagcttcaactcaatcatttcatttttggttttgcccatcgaaacaagctcgagactgtgaggaaccgtctctttttcaccttgagaaaggtttagaaatttggctaaaggagcgattgttgctccttgaagaagagcggaagttaagacaacaaagaaaacgacgttaaaaatcagcgtgctgttctccaaacctgccatcataggataagtagccaatacaattggaacagctccttttaaaccggcccaagaaataaacagtttttctttggatgagtatttagcaaacatcatcgaaagaaatacgccgagtggacgagcgacaaacataagtaaaagagataacagtataccctgccaaatgatatctaacagttgattaggaaagacaagaaggccgagtaaaataaacattaaaatttgcatcatccatgcaaaaccttcgttaaagcggacaattgtgtgacgataagttagatctgcatttcctactaccactgccattacgtatacagcaagtagaccgcttgcttctacaaatgtggaaattccataggttaaggcggccaatgacaatgtaagcacagggtaaagacctgaagaatctaaattaattcgattaataatccaaacggatgcttttccgagtactaaaccaagtaccagcccgattcccatttgccaaaagaaattaaggattaatgagaggataggagagtccggatgttgaattaattcaataatagaaacggttaagaagatggccatcggatcattggaaccagattctgcttctagcgtggagtttagtttttggcggatattctgtgtccctagtacagagaacacggctgcagcatctgtagagccaacgattgccccaaataaaaagccttcaagccaagtaacgcccaaaatatatttggcaagtacacccgttaaaactgtcgtaatgaggactccgaaagtagctaatgaaacggaagggcgaacaacgcgtttgacatctttccatttggtctgcacgcctccatcaaaaagaataatgataagcgctaatattccgaatccttgtgttaaaagagcattgtcaaagtagatgtagtggctaacaaccattcctacaataataaagagtacaagcgaagggacgccaaggcgagtagagaacttggcagtgagtacccctatgacaaggagaatagataataaaaaaattgaatggtctaccgtaaaatccaaaaaatacacctcatttggtcaaaatttttatgtaagcaataagtgaggttcctttataataattgtagcataatgaatttaaaaccttgagaaatctgcttatcaaaaaaagagatgcataaacatctcttttttggtcatgtatgaataacagggatagattcttatttgacatcttgctcgtgataaagatgaggagctttaaatgttgctttctttttaacggaagaaccttgttgatcgggacgggaacgatcgtaaatagctgttccaacaatctcagccacatcttgaagtttttctttgctgattttatcaagggtatcttcaggcgtatgataccaaggttcagacggactgtgaataaatagagcagccggtattcctgcctctgcaaaaggaacgtgatcactgcggccgccagcttggaatggcgtaggtgctccatttaatcttgtacttgaagcttgagctaattctgtgacaagatttggtgttccatcagctgtattcattaccaaatctcccgcatctcgacttcccaccatgtctaaattaaacattccaacaatacgatttttctcatcttcagatagctcactaacataatgctcggatcctagtaagcctacttcttcggctccgaatgtaacaaatcgcagttctgtatcagtaggaagagttttaaatacgcgagctaattcaagcaccattgctgttccagaagcatcgtcatttgccccaggcgctccggccacagaatcatgatgagcgcctactacaataatatcatttgttccttttttcttaaaagtagaaggtttaatagcggttacattataagatgttcgctcacttacgacagctccttcaatttttactgtacctgaaggcttttcgcctttttgaatagaagtaagaatcttttcaccttcttctttggtaacagcaagagacggaatgtagttatcattagcgccgccaagcgttccgtttagctcaccgtctgtattattaaaaataatgacggctgcagcccctttttcagcagcatttaatactttttcaccaaaagtaatagtgcctcgctgaactaatacaattttacctgtcacatctttgtttgctaaattatcttttgtacccagccctccatctacaatttcagctgtgacatttccattggtgctataagtaaaagttgtgggagagtagctggtaccgtttacgcttagtgaaaaactagctgctggtgtgtaaccggtaaaggtaaaaggctctactgcgctctcatagcctagtttagacaaacgcttttgaacaaatgtagcagcttcgcgttcagcttcagttcctgccacacgaggtttttttgagagatacgcaatgtcttgataaattttctcagtattgactttttttaatactttttgatcagaactttgatggtgagaagcatttgcagaagtagaagcttgtacacttgtaaaagataaagtcaaacttgttgctatagccaaagaaatcacggtttttttcattaaaatccccctaaatttatcgatgtagttggtactattcgaatttacaatattaagaaaatacaaaaaagagcattactacctaaatgttccagagtattccgtatctaaattcctattttgatagagaaaataattcaaataaatgaaaatgcggaaaaaaataaaggaggataaaagaaactgtgtcaaaagtaatgaaaaaaggtattagataagaataaaaaaataaggtaaactagtttaaaagtaagaagaatgttcagaacttaattgatgagacatagagagtgttaacgtaaaaaacaaaggctggtgggaaatattgataaaaaatagggagggtatacgaaaagcagcggcggtagcgggtcttctgcttgtaggggtgtacatcgtctttcaaacaatggcattttttaaaggagcatatgctcttagcagtttgataaaagatagtttactagtgggcgtaacggctggcacgttttatttactttataagcgttcggttcatacccaggtgtctgatgaacaatatcagcttgctacattaataaattcaatgccagattttatttgttttaaagatggggctggcaaatgggtggcggtgaatgattttggaagagaactttatcatttaaagggtattgattacaggggtaaaaccgatgcagaacttggggaacttgtgcctttctttcaagccgctttcttacactgtatttcatcggatgaagaagtttggagaaaaaaggaaaaggtacgcacggaagaagcatttgaaataccaaacggcgaggtcaaaacatttgatgttattaaagtacctgtgttttttgatgatggctcaagaaaagctcttatcacgattggacgagatatcactcagcaaaagcttgcagaagcgcttctcataaaaaaggaaaagctttctgtagtaggcgaattagctgccggaattgcccatgaaattagaaatccgcttacgagtattaaagggtttgttcagctcatgaaagaaacagaccgatccgcaatagggtatgctaacatcatgcttgatgagctggaacgaattaatggtattgtcagtgaaatgcttcttttgtcaaaacctgaaagtgaacattttcgcgtgttttctcttaccgaagcggttaagtatgtaatgagtttaacttcccatgaagctttattgaaaaacattgacttcttatacgatgaacaaacaaataacgctagtgtgtatggaaataaaaatcaccttattcaagtattacttaatgtttttaaaaacgcaattgaagccatggataggcctggaaatatttacattacaatcaaaacagcgcaggataaccatatttttatagaagttagagatgaaggagtaggaatttctaaagaccgtctagaacatataggagaaccgttttttactttaaaagaaaaaggaatggggcttggattaacaatcagctccaaaattattcatgatcatcacggtaccatgcagattgagagtgagcagaacaaagggacgattgttaaaatccgactgcctctgtatgtcaaagatacggcggtttttgcaagcaaatgaaatgttgtaaacgaaaagtaatgaaaacgtcatccatttcttattgctaaacgcagccgtacatgatgtaataaaagaaacgaacatgtcaggaaggtagcaaaatgagacgtgcagatcaaaaaattatattaccgtatacaccggaaaatttaagaatgctattgcttcaagtatgtgacggagaaaatccgttttcccatcaggatcttacgtattggtgtgataaatatactctccattattatgagtatgaagcggatgaaacgcagtggatgaatgatatgcagcagacagataatagacaagatctagctaaatcctatgccattgctaaagatattggctggcagtggtacttttatatggctagagggacgacgctgtctgatattcaatatgtcgagcttcacgaactagaattacccagacatttgtttgtaaaatggctaaatgaattatatgaaatgtaatcttatatatgaattgtagtacatccggtgtgatgaaagaaagactatctctggtaacggagcaaaagaccactgaagtacatacaagcgtaaaatagaaagctaaggaaaatccttagcttttttgttttgtcaaaattattcaaaaaaactgtcttcaggaaaaaacataaaacctagttgacttattggtattgttatattataagtaatagagacataatttatgggaaaaattacagggggaacatctatgaataacttattagtcatcataaacatcctcattatgctcgcattgcttgcggggctgtttatgatgcagaaaaaacatgtatcattttcaaagcgtgtgtttacagcgcttggactggggattatttttggctttgctcttcagtgggtgtatggtccgactcatgaagtaacgatgatgaccgccgattggtttagcattgtaggaagcggatatgttaagtttcttcaaatgattgttatgccgcttgtatttgtatcgattgtagcggcattcactcgcttaaaattgacgagcaatattggaaagattagtagtttaattatcgggattttgcttgtcacaacagcggtagcagctgcaattggtattttcacaacaacgagctttaatttagaatctgtccaaatcacaaaaggggaagcggaacttcagcgcggagaggacttagaaaacaatttatctagtttagaagcaaaaacaatcccgcagcaagtagtagaattattacctgctaacccgtttcttgatttaacaggcgcacgttcaacttccacgattggcgttgtcatctttgcggcatttgttggaattgcgtatttaggtgtgaagcgtaaaaaggctgaggaagcggcgttattttcaaaaattattgatacgctttatgcaattgtaatgcgtgtagtgacgctaattcttcgtttaactccttatggggtacttgcaattatgaccaaaacagtagcaacgagtgatattgatgcaattgttaaactggcaaagtttgttgtagcatcatatgtcgcattggcagctatgtttattgttcacttagttattctaacaattatcggtgtaaatccgatcacatatgttaagaaagtatttcctgtattggcttttgcctttacttcccgtacaagtgctggagcattacctttgaatgttaatacacaaacaagacagttaggggttccagaaggaattgcgaatttcgcaggttcatttggtcttacaattggtcaaaacggatgcgctggaatatatccagctatgttagccgttatgattgcaccaacggtaggtattgatcctttaacgccttcatttattttcacgttgattgccattgtagcaattagttcgtttggcgtagcaggcgttggcggaggagcgacatttgcggctttacttgtattatcttctatgaatttgcccgtagcgctagcaggcttattaatttcagtagagccattgattgatatggggcgtacggcgcttaatgtaagtggaagcatgacagccggagtcgtcactagtaaattaacaaaagagctagatacaaacgtatacaacgatcaaaccatctcacctgaaacagcagaagtgtaaaagagatacttcatccatagttaacattgttaactatggattttttttctttatccacataaaataggaaaaaatacttatgataacgctttcaaaaaaggttatagtgaaaaatgtgtacgtattttattttatgggagggttttcattgaaatgtagttggactaaatatgcaatggtactgacggctttactcttactagtaagctctttttttagcccatttatgcaatcgtttgcatctgcagcagactcaacaaaaatcacgattcactatcagcctgctccaaatgatacaaaggaatgggggttatggatttttcctgaaggaggagaagggaagccttacacatttacaggggaagatcaatttggaaaagtagcggaagttgaattacccgatacttatgacaaagtaggttttattgttcgaacagagtcgtgggaaaaagatggaggagaccgcttcgtttcagtggagaacggtgaaggagaagtatgggtgaaaagtggagatgaacatacatatatgtctcctcctgacggtgaataccgagatttaccaaagtttgataaagtaaacgttaccttaaattatcatcggtacgacggagattacagcgggtggaacatttggacatggccaggtgatgaaaaagaaggcaagcaaatcgaatttacagaagacacgaattttgggaagagagcgacttacacgattaacagtggaagtggtaatttatttgacaaaattggttttattattgtacgccattctactagtgacagcgattgggaaaataaagacggaggagaccgctttattaccaaggttggtaaagatgggaatgtagaagtatggattgttcaaggacaaaatcggatttactatgatagagctggagtagatatcactcggaaaatcacgaaagcgacgatggatacatttaatcaaatcaccttagaaacaaacgtgccgtttgactcttctaagagcttaggagacattgaaattgacggagctcaaattgagaaagtgataccttataaagagggagaagacgctgctactactaaagttaaaatcataacaaaacagcctttggacgttacaaaaacgtataaagttaagcaaaaaggctacggctcagctgatgtagttaatggaaatgtcgttcgcacgaaagaatttgacgaaaagtatgcatatagcggaaacgatttaggaaacacgtattctaagaaacaaacaaattttcgcgtatgggctccaaccgcaagcgaagcaaagctagtgacttattcgtcatggaactccaaagctgtaaaagaaatttctatgactaaaagtgaaaaaggaacctggaaagcggagttaaaaggaaatcaagatgaactaatttatacgtacaaagtaaaaattgggaacagctggagcgaagcggttgatccatatgtacgagcaacaacggtgaatggagatcgcggagttgtcgtagatttggctaagacaaatccgagaaagtggagtgcaaataagccgaaatttaaaaatccagaagatgcgattatctatgaacttcacgtacgagatttatcgtctcaaaaagagagcggtatcaaaaataaaggaaaatatttaggcgtagcggagtggaatacgaaagggccaaatggagtaaaaacaggactcagtcatattaaagatttaggtgtgacgcacgttcagttcctgcctatttacgattatcgtacggtggatgaaacaaaattaaacgagccgcagtttaactggggatatgatccaaaaaattacaacgtcccagaaggttcctattcaacaaacccatataatcctaagacgagaattattgagcttaaacaaatgattcaaacgcttcatgacaagcagcttcgtatagtaatggacgttgtctataatcatgtgtatgcagtgagtgagcatagctttgataaactagttccaggctactacttccgttataaagaagatggaactttatcaaacggaacaggtgttggaaacgacacggcgtctgaacgggagatggttcggaagtttattgtagattctgttgcttattgggcaaaagagtaccacattgatgggtttcgatttgatttaatggggattcacgatacaaagacaatgaatgaagtgagaaagaagttagatgaaattgacccttccattatcgtcttaggagagggctgggatctaggaaccgaacttgatgctaagctaaaagctaatcagaaaaacgctcaggatatgaagcgcatcgctcacttcaacgatggtatgcgagatggtcttaaaggcagcgtgttttttgatcgtgaaaacggatttgttaatggaaaacagggtcaagaaaagctcatacagcaaagtatagcagcgggaattgattatgatcgttcaactgccacgtatgaagacccggatcaagttgtgacgtatgtagaagcacacgataaccatacgttatgggataagcttcagctgacgaaccctgctgacaccgagcaaacgagaaagcagatgcataagcttgcttcttctattattttaacatctcaaggaatgaactttatacatgcaggtcaagagtttatgagaacaaaaggcggagatcataatagctatcagtcacccgattctgtcaatcagttagattggaagcgtcgagcagctttcagccaagaagtagattacatgaagggacttattgcgcttcgaaagcaatattcctcatttagaatgacgagtgcacaggctattcatcaaaatttacgctttgttgatgcaccagcaaacgtagtaggctatacgttaaatgctaaagccaataaagataaagcaaacgaaataatggtgattcataatgcaaataaacaagctcaaacggttcatctaccttctaacagaacgtggagattacttgttgacggcgaacaggcaggaacaaaaacgctccgtacggtgaaaggaaatacagtaaacgtttcgcctctttccacatttgtgctagtaagataaattttagataactagaatacgtgtagaaaaattcagaatattgtgtgcgaaattgttgattttactgaataacatggtaaaatattcattgttagcgttttcaaaattcgtggggaggtatgtatttgatgcaaaatcttggagcgaaaaaagttgaaatgagtccgaaagtagtggagtttttaaaaggagttaaacagctatacattaacggcgaatgggtagactctgtttcaggaaaaacgtttgaaacagtaaatccagcaacgggtgaaaagttggcagatgtagctgaagcaaatccagaggatattgatcgtgccgtcagagcggctagagaagcctttgatcatggaccttggacaaagatgtcagcagctgaaagaagtcgacttatttataaattagctgatttaatggaaacacatcaattggaacttgcgcagcttgaaacgcttgataacggaaaaccaattcgtgaaacatcaaatgcagacattccattagcaattgaacatttccgctactttgctgggtggtcaactaaaatggttggacaaactattcctgtgcaaggagcgtattttaactatacaagatatgaaccagtaggagttgttggccaaattattccgtggaacttcccgcttttaatggccgcttggaagctcggagctgctttggcaactggatgtacaattgtgcttaaaccagcagagcaaacgccgctttctgcactttacttggctcgactagccgatgaagcagggttcccaaaaggcgtgctaaacattgtgccaggctacgggaaaacagcaggtgaaccgctcgttcatcatgatcttgtcgataaaattgcttttacagggtctactgctgtcggaaaagcaattatgaagcaagctagcgactccttaaaacgtgtgacgttagagcttggaggtaaatcaccaaacattatcctcccggatgcagacttaacaaaagcagttcctggtgcgctttcaggtattatgtttaatcaaggacaagtatgttgtgctgggagtcgtctgtatgtccaaaaaagcttatatgataatgtcgtagctgatttagtttctcaaacgaaatctattaaacaaggaaatggattagcagatgagacgacaatgggtccgcttgtatctgcgcagcagcaaaaacgagtgaaaacctatattgataaaggaattgaagaaggagcggaagtactcgcaggaggaaacattccatttgatcaaggctatttcgtagaaccgactatctttgcagatgtcgatcattcaatgacgattgctcgtgaagaaatcttcggtccggttgtagctgctatgccgtttgacgatctcgatgatttaattgccaaagcaaatgatacagcatatggtctagcagcgggcgtctggacacaggatttaaagaaagcacactatattgctcatggtattaaagcaggtacagtttgggtgaactgctacaacgtatttgatgcagcaagcccgtttggaggctataaacagtcgggaattggtcgtgaaatgggaagttatgcgcttgataactacactgaagtgaaaagcgtatggattaatatggaataataagtaagaatttttgtgaaaatcaatagcatatctttgtgtgaaaaagagtagtctttagtggactactcttttatttgtttaagtcccgcatttttagaaaaggagtgataacattgccggttatacagggcccctcgtcgtataagcttaccggtcacctgcaaaagtttagagagaaccccctgggttttttggaaaacttgactcagtatggagaaattgcaacatttagagttgcgcacaaacgcttttatgtaacgagagaccctcaacttattaaagatgtagtcattacaaacagcaaggcgtttcaaaaaattaaactaacgcatatgtttaaaacgctgctaggcgaagaaatgttatggacagatgaagcattatatatgagccccattcaaccctcacaactaaaacaacatctaacttttaataaggaagcaatcgcaaaaataattgaaaagcatacggaaacgtgggaagaagggcagcttcgaacaatagtaaaagacataagacagatagtcatagctgtactccttcaacttgtatttggcatttcgattgaggagaaagataaaattcactatgttcaagcgcttatgagaaaaaaagaaaagttaggcaaaatttatattcgtctacctttgcaccagcctgactcagatgagcagctagaacaactcctttttgaacgcgttcaaatgcgtgttcaaaacaaaaccgcaggaaatgatttactgcagtatatattgaattcttacggagaagacagcgatgaaagagaaatatacgaacagctaaattctatattcctttcgatgtatgaaatgattacgcacgtatgcagctggtctattcatttactatctcaaaatactagggagcaccttcagctgcataaagaaattcaagcctatgctagcggcgaatcactttcaaccaaaaatctaacctatatgcgcaaaataattgctgaaagcatgaggttgtatccgcctctttggctatttgggcgtcaagcacgtgaagatatacaaatagatggctacagtattaaaaaaggggagattatgttaattagcccttatatgatgcatcgccatgaagattattttttagagccaagtgaatttttacctgaccgttttgaaaaaggagggtccattgatgtcccaagctatatgtatatgccacttgggattgagcatcaagcggaaaggggcatggactatatcactgaaatagtcaccatttttctgtcagaaatgacaaagcgctttttatttcagctgactaagcccgaatctattgctccgatggcgggcgtaatgctgaatatgaaagaagaactgaaggtgaatgttcacaaagttcacgcgcagtcttgaatgaacgggaatacttttcctctttatatcaggctgtcaatttattgacacatcctgcattgagatttatcatagggtaatatttgatagagattactgaaggatttttagaggggactatggataaaacaattaaacagttggtgtcgctagttgaaacatcattactaacgcaagttacgattcaaagtgaaagtgactatgatccagttgaagttacgaacaaaacaaaagagtgggtacttattggtaaaggaaactatgccggtgtgtttatgcacgaaaattatcctgaatttgtcgtgaaagtatacggaagagaaatttatggtgtaaagaaagaagcgcaagtgtatagaaagctgggcgttcacccagcttattctcaactttttcatgagggaaagacgtacttgattttaaaaagacttacaggcgttaccttgtatgatgccgtccagcggggaataaagattccagaacaagtcataaaagatgtgaacgcagctttggactatgcaacaagccagggtttaaacccgtatgatgtgcatggtaaaaatgtcatgatgaaagacggaagagggtatgtggtggatatctctgacttttataaagaaggttttgataaaaaatggacagaccttgtaaaagcttattacaccttttatccgtttattgataagtaccatatccgcttgccgtacccgctgttaaacgttattagaaaagcatatcgtctatatcgtagaatcaaatcaaaaaggagtttccgctaaagggaactcctttttaagatgaaatacagcgcaatacatgctgctgctcaaaagttggttttaatttgaatagaatggtttgtagtatttcagattgatagacaaattttagcgtatgtttaagggaaagaggatgtaagaaagaacgtattcttttttcagcataacgtatcacctgttcttcataaaataaagtacgtgcggagattttagcgtgaatgtcttttgttagttcgattgtaaactggataatcaataaatcagtgtctttacagtatttttctagtagcatgatatcacctccattttgtcaactcgtttacacaatcttaatataaaatttacaaatgtcaataagacacggaaaaataaatggtaagactgttctttttatatgttgaataaacaagaacgtgacagaggtgaataaagttgaacattaacgtcggatttgccattttagctgatattgataataagatgacggctgctatttatgtggaaaatcaaattgtagcgattatagctggaccttcagatattctgtatgaaaagttgaaaaaagtgtttttataatagagaaaagctgtaattgtaaatatgattcataaaaggcttaaaaattctatgaaatagtcgaaataaaagatgaggataaaatacacaaaaagaaagaacaggaagttaaggataggagaattacatatggataaaacatcttttattggactgattttaggaatagcctctcttattgtaggtatgtttttcaaaggggttaatccatctgtgttaggaaatccggctgctattttaattattattgtcggaaccgtcggagcagtagtgattgcatttccttcaaatgaaatcaaaagagtcccaaaattgtttggtgtcctgtttaaagaacaaaaaatgctgcagcccgttgatttagtatccatgttttctgaatggggacaagttgttcgaaaagaagggttactatcacttgaagcccaaattattgatgtagatgaccctttcttaaaaaatggtttgaatttagctattgatggtcaaagtgcggattatatacgagacgtgttgtctgaagaaattgatgctatggaagaaagacatcaaacgggtgcaagtattttcgctttagcaggtacatatgctccaactctgggtgtacttggagctgttatagggttaattgctgcgcttgggaacatggaagatacagatacgctaggacatgcgatcagcgcggcgtttgttgctacgcttcttggtatttttactgggtatgtactatggcatccgtttgcaaataaactaaagcgtaaatcgaaacatgaagtaaaggtaaagtatatgatgatcgaaggagtgctttcactcctagaaggagaaacaccaaaagtaattgagcaaaagctggcttcttatttgccaacagcggaacgtaaaaagcttcttcaagaaagtgaagtgggcataaatgagtagacgcagaaaacgaaagcatgaagaggaccatgttgacgaaagctggctgcttccttactcagatttgcttacacttttacttgctttattcattgtattgtttgcaatgagctcagtggatgcgcagaaatttaagaacctttctcgcgcatttaatgaagcgttcgttggaggaacgggcgtgatggaatttcaatctctgcaggaatctgaagaagcggttcagccttcaaatacccctgcagctaaaagtacggaaaaaacaaatgaagtggagacagcccctaatcagtctcctgcttcttcacaatcgttaacgagcgaacaaaaggagcaaaccattcgagaagctgatcaagaagagcttcagcaaattcaatctaaaattaatgcgtatattcaaaagaaaaacttaacaaatcaattacagacttcgttaaccgaggaaggtctcttaatttccattcgagacaatgtattgtttgattcaggaagagcacaagttaggagtgaagatacaaaaatcgcaaatgatatttcagagcttttggtgattgatcctcctcgtaatattattattagcggtcacacggataacgtacctattcgcaacgctggttttgaatccaactgggagttaagcgtgatgagagcagttaactttatgaaagttatcttaaaaaacgataagcttaatccaagcatgttcagtgcaaaaggatttggagagttcaaaccggtaacatctaacaatacagcagagggacaagcgaaaaataggagggttgaaatattgattactcctcgtacaattaaacagccgtaaaagcaggactgcttttacggctgtttttctatgtgttataaagctaagagtcttctcttttcaaagtttcctcgtactaacttgagatccattccatctaaaatcaagtcaatgagagcgcctttaaagacatccgctgtttttttcttatcattggactgcaaatattgcacgcgataccacttgtcttcaacttgaaagtacataaaacgtccgtgcgtaaaatcaatccaaaactttgtaggttgtccattgagatttttataaacatatccccagcttcgtccttggtgagcgtccttcattttagggcgagctgtattaaatacttcgtaatatactttgtgcttaatatcatagagcatcatgtgacagtcctcctatctgtagacgtgctagcaggtaaagatatatttgtatacaacaagtatactcagctgaatggaatcgtagactatttttttgagacaagcagaaaagcagttaaatgaaaaagacagtttaaattagctcaatcattccgcttttttttatactgtaagtaaatgcgttaaataaggaggaaaaaatgagacgagtaggaatagtaggtgctggaatgacgggccttacagcagcggctgaattacaaaaagaaggaatagaggtctttcttcttgataagggtaaaagtgtagggggacgaatggctacccgaagagtaggagagggaaaagcagatcacggagctcaattttttacagtgagatccgatgaatttcaacaagacgtaaataaatggatagctgatagaaaggttaagaagtggtttggtgaccatcaccctcggtatcaaagtatgaatgggatgaatgcgctagctaaatatttagctgaagatctacgcgtatacgtgaatcgaaaagttcaagccattgattttcaaaacggaaggtatcagctgtatacagaagaaaatgagatttttgaagcgactgatatcattcttacagctccgtctccccaggttgttgaggtacttaataatagtaagttgcaagcggaccaatcaattcttaatacactgaaatttagtccttgcttggttgctatcgtggagcttcacacagagatgatgtatggtgatcatggtcaaatcacgaatccttctagcacaatccaaagaatcgttaatcatgagcaaaaaggaatatcaaagacgcccgttcttagcatatatatgaataaagactggtcagaaaaacattttgatgaacatgaacatgagctgctgcgggcgataaaaaatgaaataaaagaatggataggtgcaaatcatattaaaagcattcagttaaagaaatggcgctatgcagaggttaaacaagttcttcatcagccctttgctaaaattatgccgtcgctactggtggcaggagatgcttttttaagaagggaagacgaaacaaatcactcacggttagagagcgcatatttgtcagggaaatcggcagccgctgaattaatgggaaagaacatctagaaaaaggagggaccaagaagtgaaaaataattggataatgaaacaaacgtggaaagatttactgtttattcattggcctgtagatccggcatttttggcttctttattgcctagtcagttagagcctgacacctatgatggtcaaggatggattgcacttgtgccttttacgatgacagacattcgatttaaaggaacgcccgcagttcctatcttttcacagctatatgagctgaatgtgcgtacatatgttacatataaaggggaaaaaggcgtttatttttttagtttagacgcaagcaatccactaggggtatggattgctcgtcagttttttcatttgccttattaccacgctgctatgacattcaacaaaactcagagccatatttcttttcagtcagttcgaacgcacagagactcacaaaaagagcgagtaaagcttacatatagaggtatttctccgtcctatcgcagtagagaaggagaattagctcattggcttacagagcgctactgcttatttaccactcatcaaggaaatgtctaccgaggagacctttatcatgatccttgggagctgcaaaaaggggagtgtgaaataagagatgattctattactcagccttttttgcgtcccgcggacaatcgcgatttaattgtgcactatgccaatcaagtcacggcttatttttatccttttaaaaaagtataagtatcaaaacaaaattaaaaagtcttcatacccttcttctttaagcttctcttttggaatgaagcgcaaagccgcggaatttacttgatagtattcgctgttttcttctgttaaaagtagacccagatagttatttccttctttgctttttagcgctgttgaatgctgcgccggcactctttttatgtttccgtataagatagggcgcttaaaaatgggccagcctgtatgagaaggaagctgatctgatgttttgaacagtgcttctcccgttagaaggtcaacgtaaattccttgttttttgttattccaatataaattcgtaaaaggaggttcggttccgttttcctgcgtaacaaaatattgcatgggcgttaggaccttttttagataggagcggtcctttggccaatgctgtgtcaaaaaatcagttcgacccgagccttctttgtataatttatagtgaaatgcgttttttcgataataatcctgctgctgctcttctgcttcgtaaaaagaagaaaaaggtaaaatagatgtgacgatagggttcttaaaacgtccgctttggacgagctttcttttagaatcgagagccgcttctttttgcttttcgttatgataaaaaataatggctcgatacgacggtccgcggtctgaaaactgtccggcggaatccgtagggtcaatttgctgccaatacaggttaagcagctcttcaaacgtaatgtgagaagaatcccatacaatttgcacggcctctacgtactcgttttccttttttacaagagcagaagcttcagaactgatttgttcatctctagcgtagcctgagcggatactgaggattcctgtaagatgatcaaaaggagcgaccatgcaccaaaagcaccctcccgcaaacgttgcatattctttcatgttactttcctcttttcgttgaataaaataaatgaaaatatatttatatattaaaatgtataaacaaacagaaagcgctttataatgagtcttgtaagaaagcatactcttatggtattatgaccactggataaaagaaaaatggcttattgtttatgcgagtatccttattttatgttcttaaaaagatgcagtttattgtttaagcactcatagaaatacatacgttggagcagtaagaggaacaattaaaaaataaggacgttttgctcttaaacgataccacattccagaatctacataccagtttaggaggagctagtttgaacacaacccgtttaccatctatgtgggaaataatgattgtgcttgctttatttttagctgttgttatttcatttgcaactgtttttgatttacctattcagctcgctttatttatttcatggtttattgttatggcgctaggagtacgacttgggtatacgtataatcacctgcaaggggccattacaagaggaatatcaaacggcttagaagctattttaattttattagccgtcggtacgttaattggaacatggattgccggaggagttgttccttctcttatttattttggattagagtttattaatccaacattctttttacttgctacacttatcatttgctctattacctcgatttcaacaggaacatcttgggggacggttggtacagccggaatcgcgatgatgggaatcggacaagggctaggtatgccgcttcctttagtagctggagccgtgatctcaggagcttattttggagacaagctttctcctctttctgacagtaccattttatctgcgtcaatggctcgagtgaatgttattgatcacgtaaaagcaatgttagtgttggatattcctgcttacctcattacggcagtattatttacggtaacaggatttatgtatgggggaaaagattttgatgctggacgggtagaagaattaaaatcttcgctgttggatacattccatatcagcgggtggatgctgattccggctttggctgtcattgtccttttagcattaaagaaaccttctcttccagcaattgcgattggttcattattaggaattatatgggcagttgtctttcaacatatggatgtggctagcgcatttaatacggcttatgaagggtttaaaattaataccgacaacacatttttaagtgagcttttaaatcgtggcggaattttaagcatggtcggttctattattgtcattatttttggactaggatttggcgggttattagatgagctcggcgtcttagaagtcctgctatctaaatttgaaaaaattcttgtcaattcaggaaacgttacggcttctactattttcgttgggttattagggaatatatttggttgtgcgatgtatgtttcattaattttaacaccgaaaattatggagaaaagttatgataagttaagaatacagcgtctggtgcttgcccgtaactcagaagtaggaggaaccttaacttctggaatggttccatggacggataacggtgtatttctagctacaacgcttggaatttctacattcgcttatctgccgtttatgtggctcagttttgtctctattattttggcgattatttacggatatacagggaaattcatttggtacgtaaaagaagaaaaacagcgttctgctatagcaaaataaaagaggctgggacaaaagtattttagttaaagaaaaatccgaacaatgaattgagattcttaatgaagaatcaacttcgttcggattttttttattggtatgataaacgtaggtttcatatatttcgttgcttctagctgttgattgaattgatttagttatgtctcgagctctttgatcaaatcatttctggatattcgatgttccagtggacattttgaaggtaaagctgaacatccgccttttttttctgcttcagaagtttcagaatatggcggtgatgttcattcatcacatgtaaaatggcgtatagctctttattgtcattgctaaagtacgtttgtctgatgaatccgtcttgtaaagatataagctgtttttttaaggtcacattaccgcatcggttcaaatagactcgatgaaaatacgtttgatatttttgataatcctgataattttctaattcaatcgaaacatcgatttttttaataagctcatccatcttcgtaaaatcttcttccgttaagtgatcaatcgacagcgcagctgcaagaccatctaaagcaccgacgatttcaaatacttctagtttttttggtgtgtcaatttcctttacagtaaaccctctgcgcggtctgtattctaatagattgtctgaagccagtttaataagcgcttctctcacaggcgttcggctgacattcagctgagaacaaatactggcttcatttattttgtcgttaggcagcagtgtaccgtcttgaatttgacttgctatgtagttatatacatgatcttttaatgaatgataaatcataggccccttgttcattgtttcccccctaaaataaatatcgcatcagccgttctttctcttcatgtcatggtgatgaaaaagtataaaaatagcgtgaaagaacgtacaggtgtaaaaataatcatatcatatcacttcaattaatcttagttaggatataaaaaatagaattattgaaatattttttactattcattgttgtaaaaaatctgaaaaatgatataatcgtaaaaagatttaagaagtgtatattgtatacaatatacaaaattcgtacatatcgaataaatagagcctactcctgcagagaagagactgtagagaatatgtaaataaaccaagttttttgatgggtttactataaaaaggaggtacataatgggagagaatacaacatctatgaatcagttacaaagaaaaatgaaaagccgtcatttatttatgatttcccttggtggtgtgatcggtacggggttgtttcttaattcaggctacacaattagtgcagcaggtcctgggggaacactccttgcttatttaatcggtggattaattatgtatttagtcatgatatgtctaggggaactaagcgtagcaatgcctgtgtcaggatcatttcaagtatacgctacaaagtttatcgggccgggaactggttttgcggttggctggctctactggctgacttgggtggtatctgtcggttcggagtttacagcgtctggattgcttatgcaaagatggtttcctgacgtttcggtttggatatggagcgcgctgtttgcccttttattatttggtttaaatgcaacatctgtacgttttttcggcgaaacagaattttggttttcaagtattaaagtattaacgattattgtatttattattttgggcgcagcagcgatgtttggattcattcctcttagcggtcatgaaaaagcgccgatgctttctcattttacaggggagggcggtttatttccaaatggacttatgcctgtattaattacgatggtttccgttagctttgctttttcgggaacagaattaattggtattacagcaggagaaacagaggatccggaaaagaatatacctcgcgcaattaaaaatatcatttggcgtacgttcttcttttttattggcgccatgtttgtactatctggattgatttcatggaaacaagcaggagtgttagaaagtccttttgtaacggtattcgatcaaataggtattccttacgcagcagatatcatgaacttggttattttaacagctttattatcaaacgctaatgcaggattatacgcatgttcgagaatgctatggtcattatctgatcaaaaaatggtcagcacttggttagggaaagtaacgtctaaaggagttccatttaattcgttacttatcagcatgggagtggcatgtctgtccttgctgtcaagcgtagttgcaccaacaactgtttacttagtattagtttctatttctggatttgcggttgtagctgtatggatggctattgcggcttctcactttatgttcagaagacgctatattaaagaaggaaatgatgtatcgaagcttgtttacaaagctcctttatatcctattgtacctattttagcgtttgttttatgctttgctgcttgtgtaggactggcttttgataagagtcagcgtatcgcattatactgcggtatcccatttgtccttttttgttacttgttttattatttgaaaaataaaaaaggaaacagaaaaaacgaaagtcagcctatagcaaaataaaaagcagaagacctaggtcttctgctttttttgcatacaaaaacaccctatccatccgtactggttaagtgtcccgcaacaagcgaaattgaattggatagggtgcgtatctatatagtagagaaagaggcgccatttgtcaaacttatttagcggagccttatttaaaaatagaaataagcaaggttttcactgttttttcattttcactatgtatagtaaggaatgtaaagaaaagatattcgcagcagcacgtcgtacagatccgtagaacgcgaaagaaaggaggaggtcaaatggctaagcgggatgcgtattttgataatgtaaaatttatcttaattgtattagtagtgtttggccatttgttaactcccttcattgataatgaacagtggctacgaacgctctacatatttatttacacctttcatatgccagcgtttattttaataagcggctattttgcaaagggataccgaaaaaaaggatatatgtggaagatggcgaagaaagtattacttccttatattatttttcaacttatctatgcggtatacgactataaactgtatgatgaatccacatttgaagtttcagtgtttcagccagcttggtcgctatggtttttattgagtttattttgttggaacgccatgttgttcatttttacaaaaatcaaatatcctttagccgttgcggcagttttaggaattatgattggcttatgtgaaccgctggaaacaacgttaagcctttctagaacctttgtgttctttcccttcttcttagcaggattttatatgaaaaaagaacattttaaaaagttgacgtctgtttcttgcaaaaaagtagctggaggcactttgctgattattgctctatggatccagtatatagcaccggattttgagaaagagtggttatttggttcaaaatcttatgcctctttaggtgtaaatcaattagagggaatgaccattcgtatgctattttatagcatcagcttagcaatgacgatttcctttctagctttgatccctacacaaacgatgtcctttacatctcgaggtgctcaaaccttttatgtatatgtgctacatgggtttctgattaaatatatccgcctatcttcttttggagactggatagaaagtatacaaggatacagtattcttctaattggagcttgtggagtggcgtggttgttgtcgagtaaatacgtatctactattgcaagacctttaattgagcttaaaccgttaccaaggcgcaaaagtttaagtttaggtaagtaatgagaaatggaaaaggagtttaacgatgtctaaaaacaaaataattatgattattgcagccgttgtgattattgctgcagtagctattggtgccgtagcaatgaataaatcaaaggtggttgctaccgttggtgatgaaaaaatcacaaaagatcagctgtacgatgctcttcttgctcaaggaggatcaagtgtccttgattcactgattgaacaaaaagttatttcaaaagaagcagctaaacaaaatattaaagtaaccgataaagaaattaatgctgaattagaaaaccttaaaagtcagtacgggggagaagatgcattaaatcaagcattagcatctagcggtgtaaaattgtcagagctgaaaaaagatttaaagacgaatattgaggcaaaaaaaatggtcgagtcgactattaatattaaagatagtgaaatgaaatcgtattttgatcaaaataaagattcactagctacagaagcacaggtgaaagctagtcatatcttagtagcagatgaaaaaacagcgaaagaagtaaaggcaaagcttgataaaggagaagattttgcgaagttagcaaaagaatactcaacagatacagcttctaaatcaaatggcggagaccttggatatttcaaaaaaggtgatatggtcgaagcttttgccaacaaagcattttcaatgaaggtaaatgaagtaagtgatccagttaaaacagaatacggttatcacattattaaagtaacaggcaaaaaagaagcgccaaaagcaacatatgaaaatagtaaagcaaaaatcaagcaaacgctgcttgatcaaaaataccaaacagagtatccaacatggttacaaaagctaaagaaaaaatatgatattacaaacaaacttgattcataaataataccttaacgaaatgaggggatggatatgaaacaaacagcgtcttatagtaagttagaaaaaatcgtcgaacaattgaagcacagaggtgtacgagctgagatatgtcggcgtgttgtaaaggtcacagaaactgttaatggatcaaatccttcatattcaaatcaaatcgttaggcattcataaagagtacaaaaggcgcgaactgctggacagcggtttgcgcccgtgctgagtatagctaagggaatttaaagtgaaaagagatcagtagaggcagcttgtttctgctgattctttttgtataataaagtaaacaaaaggatgcagcgaaatgtatcgaaggaaggagttacgcggaatgaatgtactgctagcagaagatgatttgcagctaggtgaattagttagttatatgctaaagaaaaaaggaggctataacgtcgaatgggtgacggaagggaatgatgcatatgattatgcatctgaagcgcattatgatgtgttaattcttgactggatgatgcccaatggcgacggaattgatgtatgtaaacgtctaagaaaagaaggatacgccggagctattcttatgttaacagcaaaagatgcggttcaagatcgtatacaaggcttagatgcaggagcggatgattacgttattaagccatttgaaattgacgagctgcttgcaaggcttcgtgctttgtctcgtcgtaattatgcaccgattttagaagaagaagtagagattgccagcatgatattaaaaagagcaagtcaaaccgtacagtttgacgaggagtttattcaattaagtcctcgtgaatttcaactcctagattttttagtgaaaaacaaaggacaggttctttctcgagatattattttagaccgggtatggggatatgaatcagatgtttccattaaaacgattgatgcgacggttaaacttttgcgaaaaaaactagagaaatttaacaaacaggatcttattcaaagcattcgcggagtaggctacaaaattgaaagctaaactgaaagtaaaacaaaaagtaaagcaagatttattcagccagacgcaaaatcgtttaacattccgatatagcgcattactaatgctgtttttgctattattcgtgtttattgtttatgcattggtatatgtggttgtatccaacagtcagcagcaaaacttaaatagcatgctaaagcaagagtcccgaattgtccaaagcatcttaattaaacaagcgataaacagctcgaatcaacagtcaaaagaagagtacaaaaacattgtcgtagccggtgaagatcagtttttttattatgtaatcagtcctgaaggggaccttattatgggaaacgaagcgagcgagcggcttcgctctaacttattaaatttaattgatggctggatccctattgagaatgaagtgcggaaagaacgaataaaagccccacgccctagtttcgaacatattgaaggagtaaaagggcaaaacggggaaggcaaaatagatattgatttgatgatggcgggtgaacctattttttataaaggtcaatttttagggatgctttatattggaaaagacgtttcatttctttatcagctgttaaagtggctccttattattatgttaagccttaccgtactgtttgtaggagtagccatttatatcagccgcttaatgtcaaaacgggctatggttccaattgaaacagcttttcaaaagcaaaaagagtttgtggcggatgcatcccatgagttaagaacgccgcttagcgttatgctttcttctatcaacgctttagaaatgcaggaggaagtaacagaagatcctttttctaaaaaattaatcaataatatgaaagctgaagtaaagcggatgacgagtctcgtcagtgatttgcttacgcttgcacgctcagactctaataaagtagaaaaagcaatgatgccctttgatattacagatgcggtgcaaaaggtaatggaatccgttgaaaccctagcgatttctaaacatattgatttgcagctggatacaccggaaaaattagtggtaactggagatcaagagcgtctaactcagctgatttacattttgttagataatgcgattaaatatacgactcctcatggaaatgtcaacattcaagtagttcagcatggaagtgaatgtatattaaaagtacgtgatacgggcgttgggatccatccagatgaaaaggatcgaatctttgaccgcttttatcgtgctgacaaatcgcgatctcgtcaaatgggaggtcatgggctaggcttagcaatcgctaaatggatcgtagaaacacataaagggaaaattgacgtagaaagtgaacaagaaaaaggaagtacatttacagtaaggttgccaatgtcacaaaaagtgaaaaagagttaaaagaggctgtgacaaaattagctgaaggaagatccgaacgagtttgattcctgatgaggaatcaaacttgtttggtttttttatgtttagggtgaacgtagatttcatgtatatagttgcttctagctggtgatttggttatgtctcaatctctttttagttagtgaaagtgaccaaatgaaaaagaaaagtttagacaaaatggcgaatgtaaaaatcagataattcagttatatttactagcgtagtatctagtctatatgtcaggtttctttacaaggagaaagactttttgaaggaaacagtgcatgatagaacaatagcagactgcttcgtttaataagaagatggagtagttaaataaaggggagtttgataacatgtacgatttaattattcgggatggttcggtcgtattagaagacgacatagtaaaggcggatatagggattaaaaaaggaaagattgtagaaatagcgcaaggtgttagcataccagcaaaaaaatacgtaaatgctaaaggcaaatatgttctgcctggaatgattgatattcacgtgcattttgatgaaccgagccgagaccattgggaagggtttgattacggttcagcatctatggccgcaggaggctgcactacatattttgatatgcctttaaacggcgttcctcctaccgtaacagaagcagcgctgtgtgaaaagaaaaagctggctgatcaaaagtcagtagtagattatggtctatggggagggttggttcctggtaataaagaagaattagccaaaatggctcattcgggtgtaataggttttaaagcatttatgtcagaagccggttctgaatttgatttctcagatgacctcacattatacgaaggaatgaaaaagattgcaaaactaaataaagtgcttgccctgcatgctgaaagaaatgacttaatacaaaagcttgaacaggctaaacagaagcaaaagcaaactgctattaaagattatttagaaacgcgaccggttgtagcagaagtaaacgcagtaaagcaagcgcttgagtacggtgaagaaacgggatgtccgcttcatttcgtacacattagcagctatgaagcagtgcagcttattacggaagcaaagaagaatggaaggaacgttacgctggaaacttgtccgcattatttactttttacagaggaagactttgaagaaattggggtaacggctaagtgtgcacctcctcttcgcagcaggagtcaaaaagaaaaattatgggcttgtattcaatcagaggaaatagatatgatttcttcggatcattctccttgtccaattgagttgaaaacagctcatcagaatgatttatttaaagtttggggtggaatatcaggcggtcagtactctttgcaagcaatgattagtgagggagccatcactagagggatttctctttctcacatttcaaagcttgtatcaacgaatccagctaaacgattcggtttataccctaaaaaaggaagcatcctgctgggatccgatgcggatttggttatcgttgatctggatcaaactgaaaaagtgacaaaagaaggaatggttttcaaacataagcacagtatatatgaaggaacggtatttaatagcgttattttaactaccattaatagaggaacgattgtatacaataaagaagaaggtgtgtttcctcttcacaaaggacaaatggtaaacggtgaatacgtaaaattgtaggtacggtgaaaaaagagataaaaaataaaccttttatctctttttttacataaaaaaatgaggatgacttatattaaaggtaatacatagggggaaaataagtatctactataacaaaacagatatttttaaagaggattttattattctaaaagctttttataggtacaattttataatgaaaaaccgtattttatgcactcattgtaaaattctgatattgacagaatcattttataagaataaaattttcttgtttctatttttttatatcatcataattttttgacagttttgtctatggtggtttacggttgaaagagaggttaaggaatatgtcggtagagagagaaaaagtgtatgaaacagttcctcaaaaaggattcttcggacatcctaaagggttatttaccttgttctttacagaattctgggagcgtttttcatactatggaatgcgtgcgctacttgtattgtacatgtacgatacaattgcaaacggtggattaggaatggaacaaggaaccgctttagcgatcttttctatttatggttcccttgtttatatgtctggaattattggtggttggattgcagaccgcattttaggtacgtctaatacggtgttttacggtggtatatttattatgttgggacatttagtccttgcgttgccagcaggtgtaaccgcgctgtttatttcaatgttcttaattatcatcggaacaggtttattaaaaccaaacgtttcaagcgttgtgggcgatatgtatagccctactgataaccgtcgagatgctggatttagtatcttctatatgggtgtaaatgctggagcatttatcgcgccgctagttgtttcaacagtaggtgaaaagtataactaccacttaggttttggaatcgcggcagtaggaatgcttttaggtctaatcgtatttatggctacacgaggcaaaaacctaggtcgtgcaggcagacaagttccaaaccctttaaaaccagaagaacgcaaaaaagtttttggtaccattgcacttgctgtagttgtactggcaatctttattgtactgacttctttagcgggcattttaactgttgaaggcgttattttatttgtaagtattttagcgattgttattcctattatttactttgttgttatgtataagagccccaaaacaacagctgatgagcgttcacgcgtattagcgtacattcctctttttatctctggagtaatgttctgggcgattcaagagcagggatcaacaattttagcaacatatgcaaaagatcatacgcagctaacgtatggtggttttaaaattccagttggctggttccaatcgttaaatccgctattcattattatatttgcgccagtttttgcagcggtttgggtaaaattaggaaatagacagccttctacaccaaagaagttttcgttaggacttttatttgcagggctttctttccttgtcatggttatcccagctagcattcatggaaatgaaacgttagcgagccccctatggctagtgctaagcttcttcttagttgtagttggagagctttgtttatcaccagtagggctatcaactacaacaaaactagcacctgcagcgttttctgctcagacgatgagtttatggttcctaacaagcgcagcggcgcaggcaatcaatgctcagcttgttcaatactatgaaaacatttcgcaagttgtttattttgctgcattgggcggagtgtcggtcattttaggtgtaattgtgctaatgatttcgccaaaaattcagcgtttaatgaaaggtgttcaataagaaaaaccgtccttaaggacggtttttttatgatttatttgaaaaaatattcatgaaggaggcgtaggtctgatcgtcctcaccctcatagaacgcaagatttaaaagtctgttaagttcgtttgttgatttttcagtttctgcaataatttgatgcatatgagcaattttagacatagatccgttgccatgagcatttttgatttgatttaatgttaaatgaagcgataagacctctcggcgaagagcttgtcttaattcagacgaagcagggataaaaaagcgtttataaaaataactcgcttcttcaaacaccaattctccattttctagctctttagccgcaatttctttaatctcttgatcgtctaatcgactggccgcttcttcgataagaaatccaaaaataatagccgtatctggttttaacatacagtaacctccattattataaaaaagaactatgtagttaatatgtatagatagaaaggaaaaaatattcatagtaattcactaatcagcatagacaaaaaaataaaaaatattcnnnnnnnnnnnnnnnnnnnnnnnnnnnnnnnnnnnnnnnnnnnnnnnnnnnnnnnnnnnnnnnnnnnnnnnnnnnnnnnnnnnnnnnnnnnnnnnnnnnngaataaagagggttcttagtacctatataaaaagaaaatttataaaagatattaaattcagaaatttctacctctttttaggtaaaaaattgctctactaaaatagttgacagcagaaatagataggcataaaatatactattgtcaaatgaattagcaagctattcataaaaagttaacggacatttgaagaatatgagtaatattcatataaggtattaattacttaaatctaaccaacttgtatgcttgtcatacaagtctacagaaaggaagatagtcgtatgcgcaacgtattttttgcagataatgaaacaattgaaacgactttacgtgggaaagaaattttaggagctccaatgttaaacaaaggagtagcttttacaaaagaagagcgtaaaacgttaggattagaaggtttacttcctccaatgactttaactttagatgagcaggcaaaacgtgcatatgagcaatttttagctcaggcagataatcttggtaagaatgtgtatttaaacgatttacagaaccgtaatgctgtattattctatcgtttattgcaagatcacttaaaagaaatgcttccagttgtttatacaccaacagttggacaagcaatccaagaatacagccacgaatatcgccgtccgggtggcgtatacttgtcaatcgataatgtagaaggcattgaagaagctcttaaaaatatcgatgcaaatagtgaagacattgatttaatggttattacagattcagaaagtattttaggaattggtgactggggcgttggcggtattaatattgctatcggtaaattagccgtatacacagctgcagcaggaatcgatccaagcagagtacttccagttgttcttgatgtaggaacaaacaacgaaaaattattaaatgatcctttatatatcggaaaccgtcatgaacgtatccgcggtgagcgctatgatcatttcgtagatcaattcatttcaaaatctcttgaaatattccctaatgcactgttacactgggaagatttcggtaatgtaaatgctcgtaacattattaacaagtacggaaaagaagttctaacgtttaacgatgatatccaaggaacaggtgctgtaacgcttgccgctattttctcagcagttcaagtgtctaaaatgccacttcgtgaccaccgcgttttaatctttggaccgggtacagcaggtatcggtattgcagatcaagttcgtgacgcaatggtattagacggtattacagaagaagaagcatacaaaaacttctgggcagttgatttccgaggccttttaacagatgacatggacgacttattaggtttccaaacgccttatgcacgaaaagcagaagaagtgaagggctggaaccgtgaagaagacaaaatttctcttttagaagttgtcagacaagttaaaccaacaatcttaattggtacgtctggtgtagcaggcgcattctcagaagaaatcgtaaaagaaatggcgaagcatatagaacgcccagctattttaccaatgtcaaatccaactccgcttgcggaagctactcctgaaaacctattaaattggacagaaggaaaagcgcttgtagcgactggaagtccgtttgaaccagttaactatgatggtgtggaatatgaaattggtcaatctaataatgcttttgttttccctggtcttggtcttggatcaatcgtggtaaaagcagaagttattacagacagcatgtttgcagcatgtgcacacgctgtagctcaaatggtagacagcagcaagccgggtgcttcattactaccacgcgtagaagaattacgtgaagtatcctataacgttgctttagcggttgctaacgcagcaattaaagatggcgttgcaaaagaagttccaacagatgttaaagcggcagtaaaagcagcaatgtgggaaccaacatacaaagaaattaaagctttagaaacagtaaatgcttaatttttagatagaaaaagcacagcttctgaaaaaagaagctgtgctttttttagttacaaaaagaattcttaagttacataacgtatatagttttttggaatttgtgtatgattctctatattagaaccacagggggttatgagatgaatacagcacgtaaattggaaacgtttactcaagattcacagcctgaaaataagggtttttggaaccgaatcaacaatattaaagtaggagttattcctctgccgctatacgttttacttgcattaattgtatatggcgcggccgtttacaacgagcttcctccagatatgattggcggatttgcgattattatggtaatgggaatgctgcttggtgatttaggattaaaaattccgattttaaaagatattggcggaccagctattttatcactgcttgtaccttccgtattagttttttataatgttttaaatcccgcatctatggaagcggtaacaactttgatgaaaacatcaaactttttatatctttatatttcttgtttagtagccggaagtattcttggtatgaaccgtaaagttttaattcaaggctttacacgtatgttcgtaccgcttgtattaggtacgttagccgctgtatctgcaggcgtagctgttgggatgttatttggctacggagcaaaacatacatttttctatattgttgtaccaattattggaggagggattggtgaaggtattttaccgctttcacttgcttattctcaaattttaggtagttcagcagaatcttttgtgtcgcaaatgattccagctgctgttatcggaaacatcgttgctatcgtatgtgctggcttaatgaaacgtctaggagagaaaaagccagaattaacaggtaatggagttcttgtgaagacaaaaggcggagatggcatctcagaagatacaaatatcaagaaaccagtagatttttcgttaatgggcgcaggtcttttaattgcatgtagtttctttattttcggaggcttagcacataagtttttaggaattccaggtccagttttaatgatcgtagcggcaacgctagtcaaatgtttacaagtaatgcctgctaagatggagcaaggtgcttaccatatgtacaaattcatttctacgagcttaacatggccgttaatggtggggctagggattttgtatattcctcttgaagatgtagtgaaaattgttacaccaggttatgtggtcgtatgtgcagcagttgttattgctatggtagcaacgggttattttgtaggtaaaatgatgaaaatgcatccagtggatgctgcaattgtaacaggttgtcacagtggtttaggaggtacgggagacgtagcgattttatcagcttccaaccgtatgtcacttatgccatttgctcaagtagcaacaagactcggaggcgcttccactgttattttagctacgcttcttatgaaacttttaggagtataaaatcaaaacaaaaaagcagctcggttcgtacgagctgctttttttgtcttatgaaacgctaacaggtcttaagataaattcttccacaacttttgccacaccgtcgttcatgtttgtatctgttacatggttggctttttctttaatatcttcaggagcatttcccattgctacgccaagtcctgcaaattcaatcatggcaagatcattataactgtcgccaatggcaatcacttcatcgcgtgtaatgccaagctgttgaattaataagtggagacttgtcccttttgtgacgccttcttctgtaaattcaaggaagtatggtttagagcgcattacacttagctctccttgaagctgcttttgaagtttcttttcaacgtgaaccagcatttccggttctgcaagcataagtacttttacaacaggttctgtaacggcatcagtaaaagatgtaacaacacggatcggcagacctgtaatgtcactttcaatatccgtaaatttattttctacttcggttataatttcatctcccacgtacgtatgaattaaaacgccttcttcgcggctaatatcgtcgagacgtgcaacagttctcggagacaatgtactgctaaatagctcttcatttgttaggcaattaatgatttttgccccattaaacgataaaataaagcttccgtacttttctaattcgagctctttcgcaatgtgaaccattccgtaagttggtcgtccagaagcaagtacaactttcactcccgattcttgcgccttcattaatgcttcttttgtgcgcggagaaatagtgtgatcatcgcataatagtgtatcatccaaatctaaaacaatcattttgtaagccatatttttaaattcccttcttctactagactcatatcttcatatggtactataaaaaaacgtttgattcaatttaatgattttttgaaaaaatgagaggtatgcgtatactttgtttgaactcctcggaagtagataaaacaatgaaaaaacgaactaataatcgataattttgattgttagttcgttttttatctcagcttctggattagtaagcagctagagtttgattaattttctgcgcatctccttcattgaatgcttcttttaagagcgtataagattgctttttttgttcgaaattttgaatagcggtaagtatgataaattcatcaatagaaaattcctgtttcaaagcttgaagcttttgacgaatggtttcttttgtaccgtatataacgtttgcttctttttcttcaattcgatagctttctttggactgctgaccaaattcttcagctttttctttggagcctaatgtagcggacttcccattttgtaagtatactttaaatatttttgtgctggatgctaatgcttttgcttcttctacggtatccgctacgatgacggaaagggcaacgacaagcgagcgtgcgcgagatgaaacgtgctgattatagacagaaatcgcttctttcagcactttttgatcgccattaataaattgagcaaatacataaggaaggtttaatgaacccgcaagctctgcgcttgaagcacttgctcccagtaaaaatatatctgccgattttttgggccttggataggcttttaaaccgtaaagagggtgatcttccggcagcgtatcgtttaggtattgtttaagttctatcagtttgtctgttaaggacttagtgggctgagagttttgttgcaaggcttgagtagaatgaggtagtcctcctggtgctctaccgattccaagatcgatgcgatttggagataatgaggctaaaacattaaaattttctgctactttataagggctgtagtgctgaagcataacaccacctgagccgatacggatatgatgcgttttagcgagcaggtgagaaattaacacttcaggtgatgatcctacaacatgttcagagtcgtgatgctcggctacccaaaagcgatggtaaccgagttcttctgctagctgagctaattgtatagtatgctgaaatgcatcttcagcacgctcaccctcataacgtgggctttgatctaaaatacttaatttcactgaaaacactccttaaagttgataaaaaaggtaagaataattgggatttattttagcaaaggatttcccgaatgaaaagagttttttaaaagaaaaatattttttgaaaaataagttgactttgccattttgaggctatatagttgaatcatcaaatagaaaagccgataaaacaacttggataaataagaattaagtgagtatgtttcaaagacacttcacttcattctccagttttatcaaacaaacagttaaagctgattggtctaccaaaggctcctgagtaaactccaggagcctttttgctataaaaaggagggggagaaagtgagcgatgtatgtattttatataacggaagctctcataattatcaacaaatagccttagtaaaagatgagctagaagcttgcttaacctcaaaaggagtgcacgcagaaactattttgtatcatgatgtacacgctttgaagcaggaagctcagaaagaagtaaaggtattcatttcaaaagtgaaccaagctaaaagtattgtcgttctgttatctggagtaaataaaacatacgtacagtcttttgaacggctaacaaaaatattgccagaagatttattgcatgaaaaaatacttctgccaattcttgttggggaaaatgtgaattctttactaaaagctaaatatgatttaaaacttttagcgtcttttttaggtagaccttattggctcagcagtctttttctgctgcatgaatacgtgtcttttgcaggcatcaacaatatgaatgctaaaagtcgtttaaaggaagcggtggatgagctgatttataaagcaggtctatctcttcaatcatttataaaatgaggtggagaaaatgagtgaattatttcgattagcaaccgtagaagatgctgaagaactgttgaatttaacacttcgggcatacgagccgattcgagagctaggaattaagtttccagccgcaacggcaacgattgaacttgtaaaagaaaacattcaaaacagccgttgctacgtgctggaaagtgataaaaaaatcgtagctacgattacagcaagaacgtataaagaaataacgaactggcctttcttatggtggtttgcggtagatcctttggttaaaaagaaaggagtaggttctaaactcttaacatgggttgaagaaacaattattcgggatcaattgggggaacctgccgttacattggctacttctgatcgacatccgtggttgattcctatgtatgaaaggaaagggtatgaacgtttttttgaagtcgatcaaggagaagaaggaaaaggtgtattcttaagaaaaatcttacatcctgaaagatacgagttagaaaagcacaaggagttgcaaaaagctaattaataatttaaaagaaaagaggaaaaaccatgtcagcaaagattttattatggaatcgaaaaggttgtcatcattgcgaggaactaaaagcatattttcatgagaaaggatatcaatatgaaagtatcgatgtagaaggaaaagattatttgcgggatttacttgaaattagatacggtattcgccatgtaccggtggttgaaattggagacgaggggcagtttaaaggagtaattgaaaaagattatgaacaaatagaaaaattgattgaagactattcatcaatcgttaaatagctggaacatctattttattaattcattaaaacaataaattattttgagacatagtgagggacaaaacacatgaaaaaactacagctgacagctatctttttatcacttcttttattactagccgcttgcggaacacaaaataaagaaacagcggctaacgcaagtaaagacaaagtacaaaaaattattgtaggaacaggtacgcaatttccgaacatttgctttctggacgataaaggaaatctaacagggtatgacgtagaacttgttaaagaaatagacaaacgtcttccaaactataagttcgaatttaagacaatggatttttctaatttacttttgagcttagaatcgaacaaaattgatttagtagcccatcagatggaagtgaatgaagagagaaaacaaaagttcctgtttaataaagaaccttataatatctttccgctacatgtagttgtaaacgaaaaaaatacgtctattaaatcaattaaagatttgagcggtaaaaaggtaattgtaggagcaacgagtaattctgctaacttaatcgataagtataacaaagaacatggaaataaaattaatatcgtctattcaggccaaggatctgatgatacaaaaacgcagctgaaaacagggcgtgccgatgccacgattagtacgccgtttgcagttgactttgtcaataaacaagcggacgcagagcaaaaagttgtagggcctgctatttcaaattcaaaagtatattttatgcttcgcaaaaatgaaacaggtttacaaaaagatgtggataaagtgctaaaagaaataaaagaagacggaacattgacaaaattaagtaaaaaatggctgggagaagactatacaaaagcagctggaaataactaaagcacttactgtgacccaagccttgaacttgggtcctttcgctacctgtagagggaaacaaaggagagaaaaagatgggaaaagcatttgatatagagctgattttcacctctattcctcaattattatcttatttgcatattacaatttggattttgattgcttcacttgtgattggcagtaccttgggattgtttattgccctgcctcgtatttataaagtaccggtgttaagtcaaatagcagcagtttatatttcttttatgaggggaacccctattttaattcaattatttttagttttttacgggatacctgctcttttacaattgattcatattgacgtttcaagaatggccccgcttgtatttgttattatcacgtattcactgagcacagcggcgtctttttctgaaatgatgcgcggtgccattaatagtgtagataaagggcaaactgaagcagcttatagtataggaatgagcggaaaacaaacgttcactcgaattgtgctgccgcaagctctcgttgtagcctttcctaactttggaaatcttgtgattgggtccttaaaagatacgtctttagcctttaccattggtgtgatggatatgatgggaagaggagataccattatcgctgcaacggctcatgcagtggaggtatatatcgcacttgccattatttattatttggtggcgattatattagagaaattttttgtgaaatcagaacagaagctgcaaaaacatgatcagcctgttcatgtataaaacgagcttactaaaagaggtgtaaacatgattattgatgtaccgtttatatggacagcgtttgtagaaattttaaaggcattacctttaacgctccttattaccatcggtccgttactaggcgggttgcttattggtattgctgttgcggctgtgagaatcaattcagtgaaaataataacgccaattgccaacgtatacgtatcatttttccgaggaacgcctgctattcttcatattatggttatttacctagggttcccgctatttattaataaactatcgagttactatggatggggcttcaatgcaaacagcattcctattgtcgtatttgtattaatcgctttgtcttttacagcgggagcttatatgtcagagattattcgctccggtttgttagctgtagaaaaaggacaaattgaggctgcgtatgccattgggatgaatcgttttcaatcaatgaaacgaattgtttttccacaggcgtttgctttgtctttaccgaatttatgtaatattttcatcggctttttgcatacgtcttctatcgcattcatcgtatcgcaaaaagagctaaacggtgctgctaatatcgtagcttcgaataatctcaagtttttagaagcctatattgctgctgctcttatttattggatgctgacgatgttaatagaagggataacagcgctgcttgaacgaaaattaactgtttataatcgaggaggggttgtatgattgcactaacaaatataaaaaaaacatttggtgataatacagtattggacggtattgatttaattgttaaaaaaggcgacgttgtgaccattttaggaccgagtggttctggaaagactacgtttttacgctgcattaatttcttagaaaaagcagatgaaggagaagtttcgattaatcaatttacggttcagtgccaaaagccaaaccgcaaagacattttaactcttcgacaaaaaacaacgatggtttttcagcaatacaatttgttcaaacacaaaaccgttattgaaaatattatggaggggctagttattgttcaaaagctgccaaaggaagaagcgaaacaacgcagtttagacgtccttgaaaaagttgggcttgctgaaaaagcaaatgcttatccaagtcagttatcaggaggtcaacagcagcgagtgggcattgctagagcgcttgctttaaatcctgaagtcattttatttgatgagccgacgtctgctttggaccctgaactggtgggtgaagtactgtctgttattcgtaaaattgctgaagaaggaattacaatgatcattgttacgcacgaaatgagttttgcccgtgaagtttctaatcacgtggtatttatggacggaggaaagattgttgaacaaggtcatcctgaagacatatttttaaacccaaaagaagatcgaacaaagcaatttttcaagcgtattaacccaacgcattctccttactcttatatttatgaaaaaacaatctaatattttaattaaaaaccaacttgactcataggaataataagtatatgatggaatcatcaaattaaacaaaccgactagatcactagaggttctttgcacaatgtgtgacattgtgcaaagaaccttttattttttactagacttaagggaagaagggtgaacgtagtgaatagaggagcattaaaagctaaaacaagcaaaaaacttattataaaagggcaggttgtacctggaaggcagcaaggaagacacttagggtttccaacagctaatatagatactcagcatgaggaattaaaaaatggcgtgtatggtgtcctcgttcatctgcggggacttgaacatttaggagttatgaatgtaggggttaagccgacatttggatcgaaattatctaaaacatttgaggttcatattctggattttaacgacgttatttatggagagacagttcaatgcgacgtgatctttcgggtgcgaggagagaaaaaattcccttctattgagtttttaaagcatcaaattaaagctgatacgctacaagcaaagcaaagatttcaacatatgggctatgtatctagtgaagctacagcttccaagctagggcaagcgagatatttaaatctgcctgatctccagttttttaattggtgccacagtcaattcagagtcaataaagggatttacaatacaattgatcaatggttttatgacgaaggaattgaaaatattcatcctagaagagttcacgtgatcgcttttttacaatttgcacaagaaggaaatggaagaaagacagaaaaagaaagagtccttcgctttggagcaggtggtttaaccaatcaattacgagaatttatgaatgggtatgaaaaaggagaatggtaatatgacacatcaaagacaattaaagctaggggctattattcatggagtcggaggaaatatgggggcgtggagacaccctgaaattttgtcagatgccagcgttaatttaggtttttacaagcagcaggctcaaaaagcggaagaaggaaaatttgatttagtgttcattgccgatgggttatatatcaatgaaaaatcgcttccgcattttttgaatcgttttgaacctcttactattctatcagcacttgcttctgtcacttctcatattggtttagtcggcactctatcgacttcgtatagcgagccgtttacggtggctagacaattcgcttcacttgatcatattagcagcggccgagcgggatggaatgttgtaacatctccattagaaggatctgcgcttaactatggaaaagagcacccgactcatgacaaacgctatagaatagctgaagagtttctagaagtaacaaagggattatgggattcttgggaagatgatgcatttattcgaaataaagaaaccggacaattttttgaggagaaaaagctgcaccgattgcatcataaaggcgaatttttctctgtagaaggtccgttaaacattgggcgctcagctcaggggcagcccgtagtgtttcaagcaggatcttctgaaagcggaaaagatttagcagcaaaaacggctgacgcagtgtttacgggacaagacaatttagaagaagcaaaagctttttaccaagatgtaaaattgagagctgcagcgcaaggacgcaatgaaaacgaacttttaatttttccgggaattggtcctataattggtagtacaaacgaagaagccgaaagaaaatatgaagaactttctcaattggtgacaattgaacatgcgctaaactacttaggacgctttttcgatcattttgatttttcacagtttccattagatgatgcatttcctgacttaggagatataggaagtaatagtttccgcagtacaaccgaaaaaattaaagaaaacgccaaaaaatataagtggacactgcgagaagcagcgctgcgaattgctacacctaaaacacaatttattgggacgccagagcatatcgctaatttgatggaacagtggttcgaagaaaaaggagctgacggctttattattcattccagcgttccgcatggtttagatgactttgttgaatatgttgtaccgatactgcaagaaagaggcctgtatcgtacaaaatacgaagggagtacgttaagaagtaacttgcagttgaatattcctaaaaatcgctacacacaggtaaaagttaactgaagcggattcaaagagactcgaaggagtctcttttttaatatttttaatattgaaaatatggtaaaattctttttgtaggttattcgtttcagttcataagacctaaagggttttgaatacccggaaaggagtcaaatggaaaaaagacataaaagtaagaagaagcgtatgatcatttcgatatctttatccgtttttttagtcgggggaggagcgatagggtggatattgtaccaaaacggaaaaattccttttttatcacagcaaagtataaaggcaagtgccattaaagtggatcaacaaaaagttgataagctggaaagcagcgatcagcaggcaaaagactttattgctgaacatcatgacgtactaaatgatttgacggggtggagtgccattgagcatccagactggcctgccgtacaagaagaagccacagccattaacaatacgattggcacgattgaagtaaaagattctgttttaaagaaagactttcagcatatggagaagctcgctggacagctagagcagacggaagatcaagcactgttaaaagagcttcatcgttattttcatgacttagatgttgtgatcaatgaagacgatggatcaaatacatattttgatgttaccagctatggtaaatcagttgtaaagacttctaaatgagccatagcaaaaagctttatacataaaagtagttttatataacaaacgtcttcgcttattcatgcatatgctacggataaggaggagacaggttatatgaaaaaaatttatttagatgcaggtcacggaggggcagatctaggggctgtcgccagcgggttatatgaaaaagacttagtgttagctgttcaacagtacatcatctcttttctttctactcactatgaaggattttctctttgtacaacccgtacaaccgatgtgtttttgtcattaaatgaacgggttaacaaagccaatgcgtggggtgctgatgtatacttatctattcatataaatttgggcggcgaaacgggatatgaagattttatttatagcaaaaatataaataaccaaaccattgtgttacgaaacgatattcacgatcatgtgaaatttgttctcactaaatacaatcactctaaccgaggcaggaaattagctaatcatagtgtgttaaggcattcatatatgccgtctgtactaactgaaattgggtttattgatacagaacacgatgcaaagcttttaaaaaatcctcaatttctaaaagatatgggggtggcatatgcaaaagggattgcgcagtttttaaacttggagcctaaatctacaaatcctgtgggagattctgacgaggaaggttttccaaagccggcttttttatataaacctttatggataaaaacaaccgaggatacggagacgtataaggatgcaaatatgtcagagagaacaggttatttaaaaaagaataccttctttcaagtttatggtgaaacgcgtgcagcctgggtgatggatggacaacattttattgaaaaaaaagatacaatcattgaaggagaaaccattacaactgcggaattaacaaaagagaatatggaaacattaaaagtgtttgtgacaaaagagaaattagaaacagccgtaaccttttccaaagaaggagccgcggcagccatcattacccttcgcgataaaaaaatactgaatgtaaaagcatttttagatagagaaaattggtggtacaaagctgaacggataaaaaaatagtgaaaaaacctgcttgttttttgaagctttcaccctagtaattttacttatttttgatagaatataaagagctgaatcgtaaagatgcataaaggtgtgatgaaaatggaagagcaacaagaagcgattgatttaacaaaagtatatgtatatgaggagtttccggataaagttgcaggcagatgcgataactgtggacatgtgaaatttaaaagcttagtaaaagactttatttttatccgtacatgcgcaaagtgcggcatgaaaaaaagcatttaaatccctacttctttataaaaaacgctcttttctgaaatgaaaagagcgttttttctctatttaacgtataaatgatcgctaagctgctctgaaatagtctctacatcttcttgtacatgtttttgttttttcatcatttctagtaggatttcttcaagattctgtgaatggttttgcttatcttttggtttatgtaagtactttgcaatttgatgcatattattgcttagccggcttagttcagactcaatctttcgcaggttaaccaatagttccacacctgcttctttgccgattaaaggaggcttaacttttccatccataataaattttcgaatgagagacgttcgttttaaattatagtgttcaataagttcctctaatttttctttttcttcttcattcaacttaattgctggaatgctgtgtcctctcataaggtatctcctttcaagagcagttcttgctgcgttcaatcatatgtaaacattctcttgtctttaataatagcaaccttttccatggttaactatggtgaaaagttactaaaatgtcgaacgtacagtctgttaaaaaactggtaaattaagaaatttggtttagtaatagttgaattatagaaggaatgtcattatctacaatattgctgctttattaaaaaggcagcaaaagggatgaatggaccgctgctgtactcaaccatttttgagagcgcagctttaaagaagaggggtgatttttatgattttttcctcataccacatctttcctcctagtaactctgtcgaatcttctagactattgtctcaagggaatagaaagaaagaagacgaaatggttgagaacgaggtaaagtcatattatgtctttattgacctcatttacatactttacgggggaggaatacgtttgaaactaaaaaaaagattaaaactaaataagataggggtagccatgcttacggctggtgtcatatgtacagcttatatgccccttcattcgctgcaaaagcctgtagtcgctttggcggcagagaatcagtcagattctttagagcgagcatttgcacaagcatctaaagaatttggtgtgccggcttcgcttttaaaagcaatttcctacaacaagtcgcgctgggaaagtcataatggaaaacctagtgcagccgggggatacggtcttatgcatttaacagacatcccttctttagaagatggaaaaggaaacggagctgtgccttcaaaaccagcatatgataaacagcaaactctctccttagctgctaagctgcttaactcagataaagaaagattaaaaaaagatcctgtgcaaaatattcgcggtggcgctgctgtgctggcttttatcgcaaaagacaaaaatggaaacataccgtccactgatcaaaaatggtacgatgcagtcgccgcttacggtgcttctcaggataaaaaaaacgctcaagtatttgccgatgatgtatatgaaacgttggaaaaaggagcagagcatacaacgtcagacggacagcatcttaaaatttcccctcaaaatatagataagtcgattcctcgtgctgaaaattccaatacgaataaagcggattgtccggcatctttaaaatgtgaatacatccctgctttttacgggaaattcagcgaaagtccttcagattacggaaactatgatattgcaaaccgccaaaaatcagatgttcgctatattgttattcatgatacagaagtaagttatgatggaacgattgatttgtttgctaaccctaatagagccgctgcaaactatgtaatccgttcaagtgatggccatatcgcacagatgatccataacaaagacgtagcatggcatgcaggaaactggtattttaatacacacagtattggaattgaacatgaaggattcgcccttgaaggatctacttggtttacggaagaaatgtaccgttcttcggcaagactcgtacgccaccttgccaaagaatataatattcccttagaccgagctcatattattggtcatgatgaggtgccgggtttgtctcctaaggctcaatcaggtatgcattcagatcccgggccgttttgggattgggggcactacatggatttagtaggaagcccagtcgagcgccagcatacaaacaaactagccgttacgattaatccagtctttcaaaacaatcagccagaagtatcagatgcaccaaagcagccggccaactttgtgtatttgcatcaagctcccagcaatgattcaccgctgctgaatgagcctgcagcttcagggcctggaacgaaacaaacgttagactggggaagcaaagcagtaactggacaaacgtatgcagtagctgagacaaaaggagaatggacagcgatttggtacggaggacaaaaagcgtggttttataatcctcataataaaaatacaagtaaaggtacaggcatattattaacgccaaaaccagggaaagaaagcattcaagtgtacggaggagctttcccggaggcttcagcctatccttctgatataccagttaaagctatggtgccacttcagtataaaatttctccagaccaggtgtacgtgggggtagagaaagtaaggagtgactattactatgccccaacttttacaacaaacccaaacgatcacaaaatgattgttggaaaagacgaatattatcaaatttattttaatcaccgctatgcgtttgtgaaagcgtcggatgtagaggttaaaagacaatagaatagagtgttaaaagaaaggaagagacagggtgttcaaacggtatgtctctttcttttcttttaaaaaccacaaaaattcagaaggttattgatgatgttttcttataatgattttctagcttattatctttttaaaaaaggaaggaatgtcctgtgattataattaagcctttaagccagtgttctttttctgatgcgctagaagcattcaataagggttttgaagattattacattccgattgagctgtcgctagatcaattcacttgtagatttggtttcgatcagctatctgtcgaccattcttttatggctttttataataatacaccagccggaattatgttaaatggaataaaaaaggtcaagggaaaaaaacatgcttggaatggaggcacaagtgtagccctaccttaccgaaaaataggaattggagaagccttactaaaagctacacttgagagatatcagcagcaaggagtagtggaagccagtctggaagcatttaaagtgaatgaaaaagccattcacctttatcagaaatatggatatgaaattgtagatacgcttttatttctaaagcatagaggtagttttcacgcttctctacttaaaaagaagaatcagcttacgtattcgttcaagcgaaggcttgcaaaagatattcaaaacctacccttttatacatacgacgttccgtggaaaaatcaatttgattgtattcatgatggagaagcgtttattgcgttggatgaaaaaaacgaagaagttggctatctattatttcaaaagaatttttcttccataggcatcgtgaattccgttactttttatctaggaagcgttaaggaacatatctcaaattcagaggacgttctggactttttattagcaaccatttttaatatgtatggaccaattgcttataatacatataatgtacctgaaaaaagaaatagcttactcgtgaaaaagttaaaatcatttggttttcaagatttatatacagatgaaggaatcaaacttgagcaggtgtttatgaaaaaacaactttaaaaagcggccatgagccgcttttactgcatttccgtaattggatgtgcatcataaaattcctcgattttttcttgctgtccttcgaatttttctttccatacttgtttcacgtcattataatttcgaagatctattccgtagaagtctgttaactcttttcgagtaatagtgattgtctgaggaacagtcgtattaatagtaaagtgaacgctgtcagcattttgtacggcagaaagtaaaatggttgcgttatgtaaaagtatgcgtttggtcttaacagacgtccagcttttttcaaacgtatgctgattagttattgcagcgtaattaattgctaagtaataaggtttttgcgtatcttgaaaggctataccttttaaataaacgtgtcctggaagtttatttgtaatttcctctactgaagcctcatgttttgaagaagaagtatattgaatagaagaagcagagactctttcggcagacagattattatgaggtgcataggcacaccctgatagccaagtgaacactgtacaaagtgtaagagaagtatatatttttttcataatggtaactccttttgtttatatctacttgtaaagacgaaagacctatatattttgtttcatacaaaatataagtttattcattaaaaagacagataatccaaaataatagaagttaataaccctaatgaggcaataaaaccaataacaggaccaccttcttcaaaagcttccggcaacatcgtagaagcaaccattgccacaattccacccccggcgaatgaggcaataaaacccatcatctttgaggtagcgtcttgaagaaataagtatccaatccaagagcaaagagctgatataaaaaaaactgaaagccataatgaaaaaattttcttttggctgtattggctttttagtagtccgcttgtcccggagattccttccggtatattgctgataaaaatagagacaacaagcagccagctaacgtggtgctgttcaatcaaacttgcgccaatcataagtgactcaggtatagcatccataatagtaccaataaaaatggctagtcccgagctagcggggacaaggtggtccgaacgttttcttttgtgagcgccttttttagctaaggtcatgtcaagaagagtaaagagtcctgcacctgttaagaagcctaaagaagaaggaataattcccgcttcttttaccgaatcttgaataagctcgtaagcggcagctcctaacaaaacgcccgtgccaaaagccataatataagcagtcaactgtttttttaaaggtacaaaaatagctataatagcgccaattaatacagctgagcctgagacaccaccccacataagggcatccatcacatgagatccctactttcttacgtacttacttgtagtgtaaccatctctatgattattatgaaacaagataaaagaactaaaaaaatgggaaaaaatcacttatttagaccttaaataaaataagtcttcggtataattgacaaaattttctgattatgtccgttgaaagtgaaaaaaccttgtgataggcttatcaaaagataaaagatggaaaaaaattcttttatctatagtcgattaaaaaccttaccaagttttacttttaaacgaaagaaggaagacgagatgaatccaaaagcagtgaaaagagaaaatcgttatgctaatttaattcctatgcaagaaattaaatccgttgaacagcagctttacccatttgatatttataatagcctgcgtcaagaggcacctattcgttacgatgaaagccgaaactgctgggatgtatttgattatgaaacagtaaagtatattttaaaaaacccgtcgcttttttcatccaaacgagcaatggaagaacgccaagaaagtattttaatgatggatcctccaaaacatacaaagttacgaaatttagtaaacaaagcttttacgccaagagctattcagcacttggagggtcatattgaagagattgcagattatttattagatgaagtaagcagcaaagaaaagtttgatatagtagaagactttgctggaccactgccgattattgtaatagcagagctgctaggagtaccaatacaagaccgagcactgtttaaaaagtactccgatgacttagtgagcggtgccgaaaataattcagacgaagcttttgcgaaaatgatgcaaaagcgtaatgaaggcgtgatttttttacaagggtattttaaagaaattatcgcggagcgtcagcaaaataaacaagaagatctcatttcgcttcttttagaagcagaaatcgacggcgagcatttaacagaagaggaagtgctggggttttgtattttattgctagtagcaggtaatgagacaacaacaaacttaattacgaacggagttcggtatatgacagaagatgtagacgtgcagaatgaagttcgtcgagacatatcgctagttccgaacctggtagaagaaacgcttcgctattatcctcctattcaagcgattggacgcatagctgctgaagatgtagaacttggagagtgtaagattaaaagaggacagcaggtaattagctgggcagcgagtgcaaatagagattcagctaagtttgaatggcctgacacttttgtcgtgcatcgtaaaacaaatcctcacgtgagctttggatttggcatccatttttgcttaggagcaccactagcaagaatggaagggaaaattgcttttactaagttactagaaaaagggggattttccaaagttcagaatcagtctttaaagccaatagatagcccttttgtttttggtgtaaaaaaatatgaaattgcttttaataacgcctgaaaagcgagcgcaaatgatgcgcttgctttttagctttcagtgttccatttttggtcctctgaaggagacgtgtaggtgtccattgaagagatgagctgttcgggagtatcagaaatgttgattagacgaatagcagaatccgtagaaaatccttcatctacggcatgctgaaccatttgcataagcgggttgtagtagccgttcacatttaataaccctactggttttttatgtataccaatttgagcccagcaaagagcttcaaacaactcttcaaatgttccgaaacctccaggaagtgcaatataagcatcagctaactcgtgcatagttgcttttcgctcgtgcatgctctctacttcgataagttctgtcagcgcggtatgaacaatttcaccgctaaacaaaccgcggggcataatgccaatgacttcgcctccgtgctgaagcatttcatttgcaacttctcccatcagacccattcgtgagcctccgtaaatcagccggtagtttttttgggccatatagcgtcctagcgagacggcggcctctttatattctgtttttattccagcgcttgatcctgcaaacacacaaattgatttcaactgcttcactcctttgtttcttctctatataagtcttttctgtttatgaagaacaaattccttcttaataatttatgaattttcacaatgtcatcgcttgattattctaaaaactttgcttataatcaaagcgaaacgtctgtttgaaagcgttatctatttcttttcctttggtgaaaaagatagtatgtatagatctacttgtaagataagtagataacatgaacttatggggaattcgaccgttttaaacgcttcatttagtaagcgtacgtacttgcaggattaggacaagggggatatggggatatgatgaataatttaatacgcacgttaatggtacaaacaccgactgtacccggaaacttaggaagagtagcaacagctatcggaaatgttggaggagacattggcgaggttgaaaccgttaaagtaggacataactacaccatgagaagcattacggttcaagtagaaagtgaagaccagcttgaggaattgcttgaagcggttcgtagtttagaaggaattattttacatacagtatcagatgaagtccttcatgcgcatgaaggcggtaaaattcaaatgaaaagcaaaatgaaaattgagtcgatcgctgacttaagaagagtgtatacaccaggcgtagcaaacgtttgccgtgctattcaagaacagccggacaaagcgaagatttatacgagcattggaaacacggttgcaattgtaacagatggcaccgctatactaggattaggaaatattggtccagttgcaggaatgcccgttatggaaggaaaagccgcgttatttgatcagcttgccaatgtaaacgctatccctattttattgaatgtaaatgagccggaagaaatcattcaaacggttaaaaatatttcaccgggattcggcggcattttactagaagatatagggtcgcctcactgctttgaaattgaagaacgtttaaaagaagagctcgatattccagttatgcatgatgatcagcacggaacagcagttgtgacgctagcagcagctatctcagcttgtcgcagcacaggtgtgaatttgaaagaagcaaaagtagggcagattggcttaggagctgccggtatcgctacttgcagaatgttcatggcttacggtgtcaaacaggtgataggagctgataagtctcctgaagcgaatgaacgcttagtcagctacggtggaaaagtagcggattcattagaagagcttatggagaactgtgatattgttattgcgacaacgggtgtacctggcttaatacaaaaagaatggatccgaaaagggcaaattattctagcactttctaatccaaagccagaaattgaacctgaagatgctcttgaagcaggagctatttacgctactgacggaaggtcagtgaataatgtgcttggcttcccaggtattttcagaggagtgttaaatgcaggggtgcgcgatattacgcatacgatgcttgtagctgcagctgaagccattgcgaattcaacgcgtccaggcgatttagttcctcaccctcttaatctagctgtacatgaagcagtatctgaagcagttgaaagagcggctgttgtacacggagagaaagacggagtttatcgataacaaacaaggttgcctcgaaataggcagccttgtttgtttttcatcaaaaagtaataaaaaaatagcaaactatgaaacttttttccttttttaacgtaatatagtaatagaaatagtgaaaaaggtagagaaaggagtttttatggagtttgaacatttaaagggcaaattgcccctcgaggctaaaaaagcgatgcgctggcaatccatttttacgcatagcctttggcttctagcaacagcgggttattttctactcgttcatttttttgattggtggtcaattattggatggatatcagctggactattagtcgtgagctttatcatatatacaattatagctccaaatgtatatatgaatgtatattcatatgaagtaacagatactcaaattgatgtacaaagagggctattcatctggtatcatacgaaaatcccgcttatgaaagtgcagcacgttgaaacattgacagggccgatttttcgaaaatttgacttggcatctgttaaaatcatcacagccgctggaagtgttgaaattcctgcacttggacaaagaaatgctgaagcactgcgggagtatattgctagactagcagaggtagatgatgaagatgagtaagcggctgcatccgctatatattgcaatagcatttatagaacatataaaaaataatatcctgccttttgtgtttgtatttattgtcaatcggcacctgttgtttacatattggtgggcaacgctattagcaggaggcgtagtcgctttatttgctttttttacttggagggaatttcgttatgaagtaacggaaacggaagtgcgtctgcataaagggattttaaaaaaagaaaaacgatttattcaacgaaatcgcattcaatcgattcagttagatcagccgtttgtttttagaattcttcgcttagcccggcttcgtattgacacggccagcagcggtaaggatgctgaaattgatttatctggtatttcactaaaagaagcgcaccatcttaaagatacgttaaagctgtcgggaagtcagccggaaataagagaaaaaagtcctgaacatatgatgaaagtgtcggtgaaacagctggcgttagctgctgcgttttccgggaattttggctatatatttgctgctcttggttttctctatcagtatattgatacgtatatcaaccgctgggtgaagacagcttacgaagaaatgattcatcaatcgatgcttggtttatttgtattagtggctgtaattgtggtgcttgcttatgtgctgtctatcgttttatatgtgatacgatttggcggttttacagtagaacgctacgatcattatctacatattaaatacggactgttaaataagaaatcccttacgattccttttcataaaatacaggctgttacgatagaggaagggttgcttcgacgcttatttggatggtcttccgtttcgttaaacgtcgtaacctctgatttaaaagaaaaggtttatttacacccgtttatccagcaaaaagagatttcagcattaatgaacgtatatgtcccgcactatgaatatataaagtgtccaagaaatacagcgattcaatatgcatggtacccattactattaccgctcttgttatttgcagcggcagggattggcaccagcttttggaaatcaatgttcgtgtgggttattgccgtgctatgccttgcgtacgtatttattcactggttagggtatcgccaaggcggcttaatgatggacgaggtatttgtcagtattcgctcgcagtttttaacacgaaaaacaacgattataagaagaaagaaagtggaacaaattgaggtgtttgcaggaacctttttatggaaaaaaggatacaggaaaataaaaatttcaactatgggtacaagcggcagctataagtcgggatattttccatttgaaatttggcatcctatctttctgcaagctacttcttctaaaaaggcatgaagaacatcattgttctccatgccttttgacgttatccattcattaaattttttccttgctcgtaatagctattcatcacctcagctggcaccatactgcctccagttgaccatataaggtgagtagcttttgacatatcgttttctagtgcttgcgcttgtatatatgaagacccgctttccatcaggtgaagaggtccttgtaaaccagccgctgctgaaggttctatatacatattttcacgattggctagctcataaataaatcggaaaagctgatcatcttctacagtataaattccgctaataagcgattttatcgtttcgcctacaaagctagatggccttcctacggctagtccatcggcagctgttacgttatcaagtccaatatccgtaacggaaatgccatcatgcagctcggtcattaatccaagcagcatgcaaggggagtgggtaggttcagcaaaaaagcagtgaacgtgatcaccgtatattgcttttaatccaaacgtaataccgccaggacctccgcctactccgcaaggtaaatagacaaataaagggtgttcggcgtctacttgaatctgcagctcggctagctgctttttcaaacgtaaagccgcaacggaataaccaagaaataaatctctagactgctcatcgtcgataaaatgacaggcggggtctgcttcggcttgctttcgtccttcttccacggcttttccgtagtcagactgatattcaataacggttacgcctttcgaacgaagcagatcttttttccatttcttcgcatcggctgacatatggacggtgacgttaaagccgagagcggcgcttataataccaatgcttaaacctaaattaccggtagatcctactgcaatagaataagaagaaaataactttttacatcgttcttcagctagaagagcgtagctgtcttcctcggtaagcagtccttctttgatagcaagactttcagcaaattttaatacttcataaataccacctcttgctttaatagaacctgatatgggaagatcatgatcgcatttcatcagcaatgtcccttgcagcttgttagtcatttgttgatttaaatagtctttcatgtgcgtaatttcttgaagaggtgattcaatgattccttttgatgcttttagctctggaaaagcgatttgaagaaaagaagaaaagcgagaaagtcgctcttttgcatcttttatatctttggtatgtaaagaaagagatgaaagtgcttcttgagcaggttttaaataaggatttatccaaagtgtttcctgcttattgattaaaggtgttaataaaggatattcacgcatccatgtagcaaggggtttttggtgaaataaatgtgtcgtcataaaggctcctttctcaatatgttatttcctttatatgtatagtatcaagaataagagaagttgaaaatgaaaatatcaaaaagtagaaagcgcattttaactacctcttgtatactaataaacataacctatacaactgcatagaaaaaaggagaggaatttatggcattttcaggcgatgatagcagatgtcctatctgcggagagaaaaataactgtgcttctgtgcaaggcagagaaatagaaaagtgttggtgcatgcagaaagtttttacttctgatctgtttaaacaaattcctttagaaagcagaggaaaagcgtgtgtatgcgtcaaatgcgttgggagacagaagaaagaaggtgaggattaacgtgaaaaaaggagttatttcatacggtgaggcatttattgattatattgctaaaaacgaatttaacaccagctttgacccttttttaggaggcacaacggttaatatagcagtcggagttcagaagttaggagcaaaagcatattatatctgcaagttaggcagtgatgaaacaagtgattttgtaagaaagaagcttttaattgaaagagtgaatcaaagcggctgtgtaatatcggagattaaaaaagtttgtgaagtgtatgtacataaaagtaaagaaggagatcgttacttccattcctacatagattctacacctcatgagcaagtgtacaaacatgagctgcaggaagctttatttgagcaggcagcgattttttattttggatcagggacgttgtttcatccgatttcccaggaaactacaaaagaagctgtgaagctcgcaaaaaaacatcgtatgcttgtagcgtttgatccaaatattcgaatgaaaagatgggaaagtgaagtagcatgtagaaatatcgtgacaccgtttttgtccgaaacagacattttgaaaatctctcaagaggagctcctatttttgatgaattcaacagatctgacagaaagcctagaaaaactgagagcgtatcatattccgtacgtatgggtcactcaaggagaaaatggcgcagtagccgttactgcaaatcaagcgcttcatgtaagtgcaaatgaagtgcaggcgatagacacgacgggagcgggtgatgcatttatggcaggaattctctggtgtattcatgaaaaaggattacctgaaagtgaggagtcacggaagcagtacacaaggtttgccaacgcgttaggtggagcagtttcggcgagatacggaggaatgatttcactgaaagcaaaagatgtatctagtataaaagcaggtagctgatagctacctgcttttgaacgtttattatttaaaaaatgacagtataatcatcagggcaaaaataatcgtaagatggttcaatgagaacacaaacattaaagtagcccattttgtatcttctaattttttaaatccaacaatcccaagaagcatccacactagtgttaaaccgaacattgtaaatgcgataattttactaaacgataaaaataagaaagatgacgctagtaaaatcactaggtatacaagcgtttggactttggaacgacggataccttttactacaggaagcattggtacacctgcggctttatattcctcaagtcttctaatcgcaatagcgtagaagtgaggaggctgccataaaaacataaatacaaacaatccaattgctaccggatgaaataagtctggtgaaatagcggcccagccaatgattggaggcatagctccagaaatacttccgacttcggtattataaatggttgtacgttttgtaagcatagtataaggcactacataaaagaaaaatcctaaaatacccataatggcggccatgttagaaactaaaaataaaatacctacaccgataacaaataaagccagtcctaaccatagagcaaatttagggttgaccgctcctgttaccgtcggtctgtctttcgtacgtttcatgattgcatcaatatcacggtcatagaagttattaactgccccagctcctcctacgacaaaggatgtcccaattaaagccaaaataatgataggaatttgtgtcacaaagcttaagtcattaacagcaattgcgagacaaagcccagcaaccattcctagtgagttcgatttaataatcccagtttttataatagcactgattacttcccgggaaaaatactgattgataggaagtgattcctttgtgataacttcggtatttttcacagcaattctcctttttgagcttattcctacatgaataaacctaatctttattaatcaactaaactattttaacaaaaaaatatcgtaattacatcaaggttgctcgtaaaatttgttaacattccttgaactttttaaaaaaacaaagaaaaatgtcgaattaccaattaaaaataagtacatcctttattataagataaaaatggaatgcttaaaaatgaaaattttgactatctggtgaacttttaacgagcaagaaactcgaacttaatcgtaccatatttattggtaattgcaatcacatagtatgtgatgaaagaaaagatgtggtacattaaagaaagaactaataagtttgtttactatgtcttattcacaaggaggatatatgatgccagataaatatgctagcttctctgaacttgcctctcatgaagtatacaaccaagactacaaaattcaattcgaaatcagaccttctaacattattatgcttgcgatacacggcggaggtatcgaaactggaacatccgaacttgctgttgggctagcaggaaacgaatactcgtattatatatttgaagggttaaagaaagcaggaaatgccgatcttcatatcacatccactcattttgatgaacctcatgcgctaactattatatcgaaagaagactatgccgtatcttttcatgggtacaatgataaaaataaaaaacacactaaaatcggcggtgctgacaaggcattaagatccaaagtgtatgaagcgcttgtttctaaaggttttagtacagaaattttatcagatcaagaccctttttccggtacaagccctagaaatataaccaataaaacagctaggcggatgggtgtgcaaattgagataagtaaagcgcaaagagaagctttttttgcaactaacacgagaaatgaacgtaaaaattcgaaaacccaagaattttttgagtatatatcagctattagaagtgcatttcctcttagataaatcagatacgttatagtatttattaaacaggttagatttattacggacatgtttgtggtatacatatagtaactacatatactggaggagataatgatgaaaacatttgaccaagaggataccttagaacgtcttaaagcctcttatcgatatttaaaaagcgtagacgtacggggaatcagcatattagatgatcaaaagcgagcggaagctgtgcagttaatcgaagagattggtcttaaaatatcagaaatgcgtgtgaaagtagagtgagaaagaagggcatctgtccttctttctctttttcaacaactataaacaggagattggccatgaatgagcaatattatgacgctttattaaatataaaaacaacgggagaacaaaagggattcaacgattcatttcattaccatcgttatgaacccacgccttatagtgcattagaaacacttttcactcagtatgagctaacaagcagtgatagaattgtcgacttcggatgtggaaaaggaaggctgaatttttatgtgaactacctgtgcaatgccaccgctgtagggatagaaatgaatgaacatttttatgagcaggccatagataaccagaggcgctatttgaaaaaagccaagggccgcaaacatcctattcattttcagtgttgtttagcccaggaatataagattcatccactagacaactgcttctatttttttaatcctttttcagttcaaatctttatccaagtagtgaacaatattttgctttcgtgggaagagaataagcgcgagattgatttgattttatattatagttcggaggattatcttcatcatctcgaaaaacacccttcttttattttaaaagaagacgtaatgctgccagagttggatcgtaaaaacccatatgaacggtttttgatttataaagtagcttattaggacgacttatttactgtttgataaagctgtatcttgacggttctatttaacaaatcagcaggaggtggaaaaagacctgctgatttcatttataactttttagaaattaaagcataacactttattatgtaagcgctttctgttataatgaaattaggttggatagcatgcgtggctatcggtgtactcagcgcaggcggggctagtacagaaagagaaggctacatacaagttaataaacatttagtggatagaaataagaactctcaaaaacaaatttattaatttgtatgctaaatcgtaaattaacaaaaacggcccttatgataaggttttagagaaaagaatccagcataatatactgtataagcaatttttttactctaaaaaagggtaaagaaattgcttatttatttttaaataagtgcacagctgttcagatttgttttgagatatctagcgttagtgtataatagtaacaagtatgaaaagttgacattgttaattgattaaaggggatttaaaaatgagtgaactaaaaatagatgatgtagcgaagcaaagcggtttaacaaaacgtacaattcgttattatgaacaaattggactgatgccagcacctccaagaagtgaaggtggatttcgtctgtacaccgaagaacatgtagaatttttaaagaagattacgaatgccaaagaagtcatgggtttttcacttcaagaattacaggaatttcttgctttaagtgatactcttgaaatacaaaagatggattataggcaagtgaaaggaacaagtcaacaaaaagaaaagttagagcaagtgttacatacggtagaagagcagctcaagctgattgaacagaaaaagaagaatatcttaaaagtagagtctgaccttttgtcactgagagatcgtgctaagactgcaattgtaaaatttgagcaggaagaatcataaaaagcaggcgcattcaccagaagagtgcgtctgcttttacggtttttatagcgcattcatttatgattgtgaagtgttttcttctagctgtacccctaaaagaagtaaaatagcctgtatcccatcggcttttccactgtgaaagcttcttgtttcagcatccaaagcttcatttacagattccatcatatttgattcgtacaagtctaaaattaattgttttccttcgggactcaaatgcagctgcccgcgttccttcattttaaacttcaacttcttcaactccctttcccataatactatcagtatacaaaattaataacatttacgtaaacgttaatttttgtatatggacagaagaacgtattgagtataggtactaagtgaggtgagagatactgattatcctttgcttgttttaatgtttgtcagcttatagccgcaagctgagcatgtatagataacgttttgattggactgagcagttaaaacggtagcaagctctttttgagaatgacagttaggacaaataacaacaggggatttcatgtgattttctccttttctttttcatagtcaaattttattttatgtaaagtttaatcaaatatcctttgtgctatcaaaaatgacggaagacatgtaaaaaagcattctcgctcaaaagaaacgggaatgcttaaggtgagtttaaaatccgtcctggcttgctgtaaatggaatgttaagtcttctttctacattgcgtaagcgctgatttaatctgtttatacgatcagtatgtcgctccacaactcgatttaaacgagtaatttctctgacttgctcctcattttgtctctcaagggcacgaattcttcgttcaaatcctccaagattttgaagctgctgtctttcatcgtattcttcatgctgtggtacgtaagggggatagtattgttgaactgagtaatcaacttgctgaggaatgtatccagggttgaaataataagggttcattagggcaccgctccttttagatagtaatttcaaatcaaacacgatataacgtatgcgaagataagaaaaatgctataggcacatacctaaagacattctgtatttaaaaaaggaaagtatttttaaaagtcaaaaggagatagccggttctttcttgaatatgcaaaatagaaaagcttcttttttagacactttatttaagaaagagggaaagtgaccgatggctcaaggaaaacaaaaaccagcacctaaaatagaagaatcaaaagctccgcctgcaaagaaacaaaagtcgaagagccgaagcactaaaaaagcggagcctcctacatcgccctgggtaaaagctgcttccattttatctaacattgatttcattcgtttgtttcgagtgctgtttcttgctttagtggttgcttttattgtgtatcaatatattttacttacaaagggaatcttcatcaaaacatatgcggccctttggcatcatcacaaaatgctcttgctggctggagctgcattcattacctatacttctttcgttttttaccttggctactgcaccgctaaaaaacggtagaactgctctagggggcgaatagcatctattctttgagcaaaccttatatgtatatcagcatagaggggggaagaaacatggacaagcagcgagcaaaacaaattgctgattcacccgttatggctaacgttacgtataacgatacggccgtttatattcaacatgtaagcgaagaaaatgatacggtaagaatttatccgctaggtaagccggaaaatgaacaaaatgtttccgtgagccaattagtagagaattaaggtggataaatagagctggtttttcagttaaataaaagccagagagctatgttgtactctctggcttttatttattcttcccatttcttactgttgattttctcaataatcccgtgcaaatcacccggcttatgaaactcaatcggagacgcgcctttttcaaacagaatcgattcggcttcaattaacgccacgtagcgtccgttcactttcgctaagtgaatattttccccgaaatcagctaacagtcctttaatctctgtttcgccaagcttcattttaagctccgcatcaggcgtatgctcgacgatatgagcggtcgcttccatgacttgatgcgtatctaagcgttcttgaagctcgcgcttttcacttgttgcccacagttccatgtctgattcaaactgttcgagttctatgctttctgcttcaaacgtttcgctgacgtgttcacgcaccatatccatcacttgtgttttcataatctcgggcatcggctcgttgtagtcaatgaatttcaagaaatcttcaaagtaacgagcgtgagacgcttggtggatgacaagttcactttcttcgaccattccttcttcaggcatgtatgggtattgaatagatttcatgtttttagtagtaatcgccatttctacgtgacgaataagggttgattcatctgaaattgaagccacttttggttcgaagtcacattttaaaataaacacaaaagcatgatcaaaatattttcttggaacagcagatacaactaaaaatgctcctcctcgaacggctgcagtatcaaggtatgcattgataaactgttcgctattttcttcaaattcttctttggttgtggcaaaacgagtgcggtgaaataaattataattagggtttgagtcgagagcgtgtcctggttcaactataaaatacccgagctttgtaggcacttgttctgctttggggtgtcgctctactttacgttttacaatttttttaaattcaccatctaaaaaatctttaatggaactttcgtcatattcttctgtatcaagcgtttgaaaatgcttatattgtttagaagcctgttcttcttttccttctacttgtattacgtaaaatgataaaaaattaattttaaaatccatagcagtcaccttgtttctttttagtcagttacttcagtataagaaagagtccggtaagcgtcaatgcctgttagctttaggggaagaagagctacttatacaattgatcagctgaggaatagtgtataaagcaaagaataagagaggcagggagcctctcttatttatactgctccagtcgttcaaaaaaggttttgacaaacttataaaaaattttatcagaaggtgctaaatcacgatttcgaggaataatcattccgactgtacgctgaagctgcggcgtatgaatagggagtttagtcgtaaaacgaggagtcgtttcagacactgtgctttcaggaagaagcgtgacgccgattcctgcggatacaagacctttaatcgcatctaaatcttctccttcagatgaaatattgggcatgaatcctgcttgtttgcaagcgtcgaaggccattttatgtaaaatgaatccttttggaaatagcacaaaatcttcatttcttaaatctcgcagccgaatgttatcccgttcagcgagcggatgatgagaaggaacaagggctaaaagattttcagtgaatagaatatggccttctatactctggtcctctacaggtacagggcctaaaaaagcaatattaatatctctttttttaaccgattcaattaaaaatttatacgaaccttgtctaagatgaaaagcaacatttgggtgttcttctttaaaggctgatataatagtaggaagaaggtgactggcaaggcttgtgggaaatccgattttaatcgttcctctttcgggatccaggtattcatcaatttgttcttttgcatagtcaatagctttcatagccgtttctgtatgctcaagaaagacttttcctattgctgttaacttgacatttcttccttcgcgtttgaataaactaacacctagctcagattccaggttcgcgatttgacggctgatcgctgattgagctacatgcagatattctgccgcctcagatacgtgttctctttttgcaacttccataaaatagcgtaattgacgcagttccataggcatcctccatctatatatatcaaaattagattagttttatctaaattatatattgtttatattgatttgaaaacttacaatgtaaacaggtgatcttaaaaagataaagaaaacgaacgggggagaagaagatgacatacaatcaaatgccaaaagctcaaggtctctaccgtcctgaatttgagcacgatgcatgtggaatcggactatacgctcaattgaaaggcgtagcgtcacatgatatcgttaaaaaaggactaaatatgctttgccagcttgaccatcgaggcggacagggaagcgatccgctaacaggagatggagctggattaatggtacaaattccacacgcgttctttaaaaagacatgcggtgaattgaacttgccagaaaaaggtcgttatggagttggaatgatctttttctcaaataacgaagacgagcgtcgagaaatcgaagcttatattaataaattaattgaagaagagggacaaacgttactaggttggagaactgtacctgtaaatgtcggaaaaatcggaaaagttgcaaaagaaagctgtccgtacgtacgacaagtatttattggggcaaatgacagtattcaagatgacttagcgtttgaacgcaagctatatgttattcgtaagcaagcggaaaattgggcgcaggcgcgtcaaaaccgtttttattttacgagtctttcaagtagaacaattgtgtacaaagggttattaacgcctgaacaagttgatgctttttatcttgacctacaagatgaagattttacttcagcgttcgctttagtgcattctcgctttagcacaaacacgttcccaagctgggaaagagcacatccaaaccgttatttaattcataacggtgaaatcaatacgcttcgcggtaatcaaaactggatgagagcacgtgaacaacagtttgtttcggacgcatttggtaaggatttgccgaaggttcttccgattttagatgctgaaggaagcgactcctccatgttagataatgcgctagagttctttgtattggccggccgtaagccagcgcatgcagcgatgatgcttattccagagccttggtctgagaatccgcacatgtcaaaagaaaaacgtgctttctatgagtatcatagcgcattaatggagccatgggatggtccgactgctatttcgtttacggatggaaagcaaatcggtgctattttagaccgtaacggtctacgtccagctcgctactatgttacaaaagatgattacatcatactttcatcagaagtaggcgtcattgatgttgaagatgaaaatgtattatataaagatcgtttaagcccaggtaaaatgcttctaatcgatttagaggagggccgaattatttcagacgaagaaattaaatctgaaatggcacaggctgagccttatcaagagtggttagatgaacagctggtaacgttgccagaagtacaaggagaaaaatctgaatacttcgatgatttggtcatccgccagaagtcatttggctacacgtatgaagatattcataaatatttagttccagttattacagaaggaaaagatccgcttggttcaatgggtaacgatactccattagccgtgttgtctgatcttcctcaatcgctgttcaattactttaagcagctatttgctcaagtaacgaatccaccgattgatgctattcgtgaacagttggttacatcgacaatgacattgcttggtgcagaagggaatttactgcatccaaccaaagaaaacattcatcgaattcagcttgagacgccggttttaacaaacgatcaaactgatcagctgaagtctgccattcatccggatttcaaaagtgccgttatatctgctgtatttacaaatgatttaaaagcagatcttgatcgcgtatttgctgaagctgaagcggcaattaacgcaggtgctagcatccttgttctgacagaccgtgaagcgggagctcaatccgtagctattccagctttattagcggtcagcgggctgcaccagcacctagtgcgaaaaggaaaccgtacaaaggcgagcattgtagtggaaacgggagaagcgcgtgaagtgcaccattttgcagcgctgattggttacggcgcagacgcaattaatccatatcttacttttgcaacatatcaaaatgaaattaacgcaggtacgttaaacgtatcgtatgattatgctgttgagaaatacgtaaaagccgttactgaaggtgtcgtaaaagtaatgtctaaaatgggtatttcaacggtgcaaagttatcggggcgcacaaatttttgaagcagttggaatcagtgcagaggttatcgagcaatattttacaggtactgcctcgcagcttggcggtatcggtttagatgttatcgcaaaagaagcaaaaacgcgtcatgacaatgcttatgttgaaacaattgagcaaacgttagaatcaggaagtgacttccagtggagacacacgggcgagcatcatgcgtttaatccaaaaacaattcacacgctgcaatgggcttgccgtaagggagattacagcttatttaaaaaattctctgaatcggctaatgaagaacgcatcggtttcttgcgcaatctgttctcgtttaatggatcgcgttcatctatctccattgatgaagtggaatcagttgattcgattgtaaaacgttttaaatcaggtgctatgtcgtttggatctttaagtcaagaagctcatgaaacattagcgattgcgatgaaccgtttaggggcacgcagcaacagtggagaaggcggcgagcatcctagccgctacactctggatgagaatggagataatcgccgcagtgcgattaaacaaatcgcttctgggcgttttggggtgaaaagtcactaccttgtgaatgcagatgagcttcaaattaaaatggcacaaggtgcaaaacctggagaaggtggtcagcttccaggaaacaaagtatatccatgggtagcagatgtgcgtggatcaacgccaggagtaggcttaatttcacctcctccacaccacgatatttattcgattgaagatttagcgcagcttattcacgacttgaaaaatataaaccgtgatgcacgaatcagcgtcaagctcgtttcaaaagcaggtgtaggaacgattgctgccggagtagcaaaaggagtagcggatgttattgtcattagcggttacgacggaggtacgggagcatctccaaaaacaagtattaaacatactggactaccgtgggaacttggcttagcagaagctcatcaaacacttatgttaaatggtcttcgtgaaaaagtagtgcttgaaacagacgggaaattaatgacgggtaaagatgtagtcatggcagcacttctaggagcagaagagtttggttttgctacggcgcctttaattgttttaggctgtatcatgatgcgtgcgtgtcacttagatacatgcccagttggagtggcgacgcaaaatccagagcttcgtaaaaagttcctcggagaagcggaccacatcgttaactatatgaaatttgttgcacaagaagtgcgcgaaattatggctgaacttggatttaaaacagtggatgaaatggttggacgtacagacgtattaagcgttagcgaacgtgcaaaaaatcactggaaggctcagcacttagacttaacaactcttttatatcaagctgaaggtgtacgtacctttaaaacacctcaaaatcataaaattgacgaatctcttgatatgcaaaagattttgcctgcggtacagcaagcaatcgagcataagtatcaagtcgagttagaacttccaatttctaatattaaccgtgtagctggaacaattgtgggaagtgaagttacaaaacgttacggtgagaaaggtctgccagaagatacgattactcttcgattcactggctcagcaggacaaagttttggtgcgtttgttccaaaaggaatgtctatgtatctaactggagatgcaaatgattatatcggaaaaggtttatcaggaggtaaaatcattgttgctccacctaaggaaacaacagctgtgtcaggcgagaatgttatcgttgggaacgttgcattttacggtgcaacaagcggtgaagcctatgttagcggtctagcaggggaacgttttgcagttcgtaacagcggtgtgaacgtagtggttgaaggaattggcgatcacggctgtgaatatatgactggcggacgtgttgtcgtattaggcgatgtaggtaaaaactttggtgcaggaatgtcaggcggtattgcttacgtatttgctgatgatcaagaagcattcaaaaacctttgcaataaagacatgattgggtttgagggcttaaaaggcgaagaagcagaagaagtaaaagagatggtttcaaatcatctgaaatatacgaacagtcataaagcagcatttgtcttggaaaattgggaacaatcactttcaaaatttgtaaaagtgattccgaatgattataaacgcatgatgaatcgcattgaagagcaaaaggcagctggactaacggaagaagaagcagctatgagtgcgtttgaggaaaatgcaaaacaagaaaagaaagcatcggcaaaacaacaagaagcggtagctcagtaagaaaggggagagtacgatgggaaaaccaacaggatttatggaaatcaaacgtgaaaaagggaaggaacgtgacccgttaaaacgtttaggtgattggaaagagtatgctgctcctttatctgatgaagcgctaagccgtcaaggggcacgatgtatggattgtggcacacctttttgccacatgggaatggatattaatgcttttacttctggatgtccaatctataacttaattccagagtggaatgatttagtttataaaggacgctggaaagaagctttagagcgtttaatgaaaacgaacaacttcccggagtttacaggacgagtttgtcctgctccgtgtgaaggttcttgtacgcttgctatttcagatccagccgtttcgattaagaatatcgaacgcgctattattgataaaggctttgagaatgggtggattactccgcgtattccggagaagagaacaggcaaaaaaattgctgttattggctctgggccagcaggcttagcaagcgcagatcagctgaaccaagcgggtcattcagtaacggtatatgaaagagcagatcgtgctggcggtttattaacatatggaatcccgaatatgaagctagataaagaagtagtggaaagacgtgttcgcttattgacgcaagaaggtattgattttgtaacgaatacggaagttggaaaagacattactgctgaagagttaaaagaacaatatgatgctgtaattttgtgtacaggggctcagaagcaaagagatctagtactagaaggtcgtgaagcaaaaggagttcactttgcaatggactacttaacaacttcaacaaaaagccttttagactctaacttcaaagatggtcaatttattgatgctgaaggaaaagacgttattgttattggaggaggagacactggagctgactgtgtagctactgctcttcgtcaaaaatgccgcagcgttgttcagtttggtaaacatcctcagcttcctgctgagcgtacggcagataatatgtggcctgaatatccacatgtatttaatcttgaatatgcttatgaagaagcacaggcgaaatttggggacgatccacgtgaatattcaattcaaacgaaaaaaatcgtggcagatgagcaaggcaatctaaaggaacttcatacggtgcaaatggaaaaggtaaaaggtgaaaatggacagtacatctttaccgaaattccaggaacagaaaaagtatggccagctcagcttgtctttattgcgattgggtttgaaggtccagagcatccggttctatcagcgtttggtgttgaaacgaaaaatcgtcgcgtagatgcagcgtatggaaattacaaaacaaatgttgaaggtgtttttgctgctggtgacgctcgtcgtgggcaaagtttaatcgtatgggctattcatgaaggtcgtgaagtagctaaacaagttgatagccatctaatgggagcaactgtattaccataacaaaaaaccgtcacaattgtggcggttttttttttttctaggatttggaacttcattttctctacgtaaattttcaaacgaaacggttaaaatcgtgttggtaattcgaacctgtgaagcgggggagacgctgtataagttaaaaagttcaaatatccaggggtcacgtttttttaactgtcgcgcggctttttcaacgcgttcgttaatagatccgctgtaattgttatagttatcatcaacaaatcttacaatggaacgaaataagtattctgttagtttgctatccatcccgcctcgttgagcatctctgtagatggactgatactgtcgttttaaaattttcatcactctgtctatatcgcgtgtagatctaacttcctcttcttcatgcaggatataagaaaataagtcttcattgtatctataaggttctaaataattttcattcgtagtaggaactactggatggtagtagcgcggcatataggggtaaacccattgactgtacatgaaacattcacaccttcctcgttcatttcccattagtttatgcacgaacgtgctagctgctgcatgtttgttttaaataaaatttaggagtttgataataggaccatcctctaaactcttgataagtcgatataaaataaatgtaaatcggtgtatttagcaagtcgggataatgttgaaaaaacgcttggtctccgtaaaatattgcttctaaagcaagggggagttcacgacggaaaatctgataacgaagctgcgcttgctcgcggctgaactcgcctccgctaacaaaaacttcgccttgaataactgcttgtcggtctgttacgtgaagagcagctagtacttcatcacgcatatttttatctatcgccttgttgttatatgagcatccgatgcttaaaaaaagctgaccggttgtatcagaatgagtaagagtatattttcttccggaaaccggataggaggaagtagcaggtggaataagagtcgtagaaagttttgaagaattaaacgaactcatagtcattgacactcctttttttgaataaatttcaatattatacggcgctatgggctaagttgtgataaatgtctactttctttctgtaagaaaggcgttttgatgtactttttgagaaaaggatggtaatatttaactaaaattatgcatgtatagtccccaagagtgtcttcaaaagcaaatgtgaatggaggttatcacttgaatatcacaacgtttgacggtaagtatggaaactggctaacgactaaaaatcctcttcaatttcaagcagcgactgcctatgggaacattgggctggctcctatctattggggaacaaaagaagaaaaaaatggatggtattacatgtatcagcctgaagaaataacgggcgttcaagtagaaggtgaagttgatggtggtaaatttctcattcgaattcctgatgattggaatggaaagttagttatgtcaggagtcccagctacccgagatgagaaatcaacggatttactattcagcgactatgtgttggcaaaagggtttgcgtttgctgcttctgataaaggaactcagggagaagaagtgatagatgatccatttgctaaagcaaagaacgctctagtgaaagaagaagactccattagaaaatggcatattcaataccgagaagtggcaaaaatagctcagagatttttgtttgaaaattatcgtcacaaacttcaaaaagaagtgacagaatatttcgatataaaaacgtatgcgttaggtatttctaacgggggttatgttgttcgctatgctttggaaaacgatggaaaaaatggagagcctcagctttttaatggaggcgttgaatgggaaggggttatgtggcgagctgatcacgataacttgattacttccttaacacctgttgtaaatcatgccgaagaagcactgtacaccgtaggtgaatcgcaaaaagaagctttgcaccgtttgtatcaagcagggttgccaaaaggatctgagtttttatggccatatcatgaccagtattattggtttttaacgcttaatatatatagagatgagtttgacagtcaagcacctgaaagcattccatggcaaaaatacttgactctttttgaaaacggagttagagatcgttcgttagattctatttttgaaaagtatgattatcaagaaagaccgcaagatgtaaagcaaagagttcgtgaaattgaaaatacaggtgatatttccgttccgttgataagtattacagggtcgttagatgctcttatttttccggatattcatgcttatccttatgaacaactggtaaaagattctggtaagcaacaccttcatcgtcactatgtaattgaaaatggcaaccacattgatagcttagtatggaatcatcaaattgacccagatcgaaagcttcagcctctcctcccttatgtgtatcaaggatttgaactgctatgtgattgggtggagaattttgaagaacctccgaaaaataagaaaataagtgcgcctctcaaggaaatgcatgtaaaagatctaaaaacagaggaagacgtgctgccgttgactacaaagaaaagcatatcaacagaaaaataaatcgttcaaaaccgtgccgaaggtgcggtttttaatttggaaaagcaatgtttgaataaaaacacctttggtgaatacaaaatattatagtacgataagaatggaatatacgttatttgttatttattttcatctatttaaaataaaaataataaaaacattgaacaaaaccgaacttttgtgttagattaataactataattcgtacatttattaaatggctacagttgaaaggagcaaaaaacatcatgacagcgaaagtaattaaaggaaaagaagtagcgcaagaactgcgcgccgcattaaaagaagaggtagctcaattaaaaacaaaaggtatcgttcctggtttaaccgtgattttagtaggagaaaatcctgcttcgcaatcatatgtaaaagcaaaagcaaaggcttgtgaagaaatcggtgttgcgtctgaaattatcaaacgtgacgtatcgattactgaagaagagcttttaaacgaaatccatcacttgaatggaaatccatctgttcatggtattcttattcaacttccattaccaaaacatattgatgaaaaagcagtattaaatgctgtatctcctaaaaaagatgtagatggcttccacccagtaagcgtagggaatatggttattggcgatgagtgctatttaccatgtacaccacacggtatcgttgagttaattaaacgttcaggtgaagaaatttcaggtaaacatgcggtagtaattggacgaagcaatattgttggtaaaccagtatccatgctgttacttcaagaaagtgcaacggtaacaattgctcactctcgcacaaaagatttatctgctttaacaaaacaagctgatattcttgtgtcagctgtaggacaacctagacttatcaaagcagatgatattaagccgggtgccattgtaattgatgtaggtaacacaatggaaaatggtaaactcgttggtgatgttgattacgaagcggctttagaagttgcaggttatatcacaccagtaccagggggagttggtccgatgaccatcacaatgttattaaaaaatacggtagacgctgctaaaacaattaacaacgtaaaataataaaaagtaaaaaagaggctgagacaaaggtattttcgttgaatgaagatccgaacgagtttgattcttgattgagaatcaaactcgttcggattttttcattgataaagtcaacataggtttcatgtatggaggtgcttctagctggtgattggagggcaaggcgaaaacttccgcggaaatcaatagcggtgttacaagcgacaatactagagaatttatccagtttgttcgtctttaggttggattgatttcgttatgtctgaatctttttttgcttcagtaatggaatggaggctaacagaatagaatgtaacaacctgtatacaaagagggggaagccatggttacgttacctgcaaccgtatattctcaacaaatggtgaagaaaaagttaaacgtttactatccagttgtacatttgactaatcaagctgttcagcacagcatgaacagtaaaattttgcagcgcacgaatgaattaattcgtcagcagggatatggagaaaatccggatacagaagaaacgggttattatgagttgaaaacaaacgagcgaaatgtgctcagcttaacacttgtcaattttgcttattccgggggagcgcatggattgaccgtggtcgtcccgttaacgtttaatgtgctgactggaaaaacgtatcaactcaaagatctatttaaaaaagacagtaattacgtgagcattctttctaaaatagtaggagagcaaataaaagagcgcgatattatggttcttggagaatataaaggaattaaaccagatcaagatttttatatcgccgataaatcacttgtactcttttatcagctgtatgacctggctccttacgtatatggaattccttactttcctatttctatctacgctattcaagatattattgaagatgaaagtccacttggtcaaatgtttggataaagttataaaaaattgcggtgcggccgtacgtatctttttaattcggccgctaactgctgacgaagcgaacgaacgccaatcgcttcagcaatatcttttgctacaggaaataccccaatattagtgatatgaacacgaaggtaaccctcatacaagcatcctcggtccgcatgcttgattttggtgcgtacaacagcttctattttatcgttttcattttgcaaagggtaagagtctgtaatatgaaaacgaaaagaatattcctccatcaccatcatccttctttctatgatatgtactagcatactatacaaatagtgaatcagaaaaaataaatgtgtcaaaaagacaaagcgcaaagcaatcaaggaagcagtttcctgtatgtaatgatccttatttgtgaacgataacagaaaaagacaaaaagctggagttgcgatgataaaaatagcagtcaaaggattacttattattttatctctatatattctgtatgtggttataaccgcggtggttctcttttatgtacctttaaaaaaaggagaggaaacgacctcaattaaaccggctagcttttttggtcacagggagtctacggatcgagtgagacttcttgaagatggttatgaggcaggaagagttcgtattcaaatgattcaagaagctgagaaatcgattgatattacttattactcaataggaaaaggagagtcaactgatttaattatggccgctctttttaaagcagctgatcgaggcgtccatactcgcgttcttttagatgggatagctaacggcttacgaggaaatcgaagaggcgtactctatgcattagcttcacatcctaatattgaagtgaagtattacgaacctcttcaattgtttaaaccttgggcgtggcaaaatcgtatgcatgacaaaataatgattgtagacggagagttaggcataataggaggacggaatataggggacaaatatttggctaaaaagcctcctccagatttcgtctatgatcgtgatgtctttattacaaacagcaaacataaacaagatagcgttatcactcaaatgcaaaattatataaatgaattatgggctcatccttacactaaaaaagcttttcatcatctcacacagtaccaggtcgatcagggaaagagaatgaaagctttgctgctgcagcaatatgataaagctaagcaagtaggagaaacgtttgcgacgcctaagattgattggaatgcttccaccgttcctacaaagcgtgtttcttttattcataatccaattgaacgctttaataaaagaccttttatgtggaaaacgtttattaacctggcagaaggagctaaccgctctgttcttattcaaagtccttatgtggtgccaaccaatgcgatgagaaagtatatagcaatgaaaaagaatccagctgttcaatggacgctactcacaaattcagttacatctacgcccaatgtgttggctttttccgggtatataagtatgcgtgataagattatgaagacaggtgtaaagctttacgaataccaaggaccttattccatccatgcaaagtctgtgatttatgatcaaagactgagcgccgtaggctcttttaatttagattctcgttctacatttttgaataatgaatcaatggtcattatcgatagtcaagaatttgcaaaaaagttgacgatggcgatggaaaacaaaatggataaaagtatccttattgccaaccataagcgatggattaaatctcctgacatccaaaagaaagaagaacctgttatgaagcgaaccttcctatacgcccttgcaaaagtgacgaggttttttaaggaatttatttaaacaatcggcagtaaaacaaaaagcactcaatggtatatccattgagtgctttttgtgacatatcttataaataagtgaataaacacatttataagatatgtaaattatccccttttatttactggagaaaatcggtagtataaacataataaataaaaaggaggaaggtacatggaaaccgccgttttaatgaaaccagatgtagcttataaaaaggcttatatgagcttttatcatgaatggaaagcaagcggagaaaaaatgattccgtgggtaattgctaaagatcctgcttactttgaaaaaatggttcaagagttgttagatgcagaaaaagggatcggattaaaaaaaggatatgtacccgattccacctactggctaatgcatcacgaaaaagtaataggcgtagttaatatccgccatgagctaagtgaaatactgcgaaacagcggaggacatataggttatggtattcggccaagcgaaagacaaaaaggatatgcgaagctgctactgaagttatctcttcaagaaattaaaaagctgggagttcaacgtgcattagttgtgtgtgatgattggaacacggcttctcgtcgaactattctggcaaacggtggtatacaagacgaggattatatagaagagaacggagctgttgttcaacgcttttggattcatacggataaaatggcataaaaaagagatgaattttttaattcacctcttttctgtttagtcatattgttttaaagctaacttcagccgcatataggtatacatagcgtatgcctgtcttccttttaaactgtacggatttgctttggagcaaagacagtcaaggaattgctcatcacatgagcggcatgatccgtaatcttcatagcataaatcatggtatttacagcagcagtctacatcatttacaggacagccgggcccactgcagccgggaccacaccatttatagccggggaagaggcagggcgtggctttccgtttgttcggaacagacataatcatacatccttttcaatagtctctttacattaaatgcaagaaagagaaaagagacagggacaaacaccttgcagcagcagcctaatttttataaatttctatttaatcgataaatgcgtcattcatccgcattagtagtttgccaaacagctccttttcttcacttgaccatttttttaacatactatgatagcgttcaaggcgcatttgtttatcagtttgcagcatgcgttttccacgtggtgtgatgtcaaataggctgacgcgtccatccgaaggatcagaagagcgggaaataagctttttgttttctaaagcagcagcttgtctagacagagttgaaatgtcgagtttaaatgcttctgctagctcttttacacgagctggtccaaattcatctaattgccgcaataataaataagctgatctttctagatttcctattttattttcagaattatcaagatagacggctcgtctaataaaggtagtaagttcatattcaatcaattcaattgaatttttttcttgcattataatctctccttacaaaatcattcattgacaaagaaatatatacttgtataatacaaatgtatatatagttgtatagtacaagtaaaagtaagtaaagtaaaggatgtttatatagttaaatgttagacaacatgacaaagtaaagagaggaggacaactgttctttatctataggacagtgacctataatgaaagtgatacgaatcattttacaaatcgcgattctttatgctttttctatgattggcgaagctgttcaccacatacttcacctgcctatcccaggcagtattataggcttaattttaatgctcatttgcttaacgtgcaaaattgttcccatcaaagtgatcgaagacggagcaagcttcttgttatcttttttacctttattattcataccagctatggcaggagtgatgaattatccttcgcttctttcaagcagcggagcgattttgtttttaattattgtgcttagtacaatcattacgatggctgccgcgggggctgccagccaacttttagaaaagaaagcgaacaaacgaaaggagaaacaacagtgcaagaattctttatcgcgctctttataatcatagctacagttgctttgtatctagtcatggcgaaagtatacgtacggttctcctacccaattcttattccagtgttaactacaaccgtattcgttattcttcttttgcttgcttttcatatttcttatgacgagtatatgattggaggcaaatggattaattcacttctggggccagcggttgttgcattagcgtatccactttataaacagcgtgagatgctagtgaaatacagcattcctattattggaggagtgtttgtaggattatttgcaggcatgattagcggacttgtgttcgctgaagtattcggcattgaccgaagcctgattttatccattgttcctaagtctattaccactcccgttgcaattcaaattgctacgggactaggaggggtgccatccatgactgtggtatttgttatgattgcaggcttttcgggagtaattcttggacctttacttttaaagtggattcgtattaaaagttctttaggaaaaggaattgccctaggcagcgcttctcatgcgctaggaacttctaaagcatttgaatacggtgaactaacggtatcgatgagctcggtatcaatgacgttaagcgctgtactgggctcggtttttgggccgattgttgtctggctattccaagtgtaaagtgagataagtaaatacagaaaacaaccctgtttgagttcaaacagggttgttttctatgtcaaattacgaattttattcgcagcaaactttcagttgtgcggctcttactctggtactataataaaaagaaagaaaattcataaaataaccgcttttttgttatttttaggaaggctagtcaattgtcagttgggtaagtaggcttagtcaaggttatatacgcagtaaaaatagcagaaaagaggagctgaacatattttatgaaagaggagctcgtgtatataggaaaaaagattcttgaacataaatatagcttgtcagaaaaattagccgaacgtttagattctacacatacgctaagtatagaggaattaaaagaaaagaaaattttgaaatggcgagtgtcaattatggagtactttggaagagcgctatttgaagaacaagaggatgtacttaaacttgttaaagaatgggcacttgacacgggaaaatatgcagtggaaaaaaatattcctttagaaaaagcactcggtatcctcccaatctatcgcagcgttatttgggatgtatttacaagagaactagaggagcatcagtttgctgcaattaccatgctgcatgtcagtgagcgaattgatccgcttttagatacggtaacatatgtttttggtcaaatttatgatgagcataatcgatatatgatgaatttagcttacacgtcactagaagaactgtcagttccgctcgtacctgtcacaaaaggtatcgctattatgccgattattggagaaattgatactcatcgctcgcaagttattatggaaacttgcttgaaaaaagggacaagccttcaattatcctatcttattttggatatttcaggtgtcgtgattattgatacaatggtagcagacaatctgttcaaaattcatcgatctctcaaattagtaggagtggaagccattataacagggatacgaccggaaattgcccaaacggtagtgaaactgggaattaattttaatcaaattaaaacagaagcaaatttagaagcagcgcttttaaaaattgggtttagacgtcctgaagaacatagccgtgcgcatgtatcatcacaacgcataaaatgacctgttatgaacatacaatggagatattccttcttctaaacgtcggtatgaaatatggatttcagcagatagaaagtaagcgcatagtaaaaaagcggatgttaatcaacatccgcttttttacttaataaatgccatatgccatggtagcacaaaagcataaacgaggaagtatagcactattgaatagataaaaaaccagccgtttaaatgcatatagccacttttaatcattccgtattctatgagtagtgaaccagcgcaaaagagaagtgataaaacccatttatttttagctgttaagtaagtcaaaaataaaatggaaagagaaggtggaataaatgtatagcttagaatatctccaagtcctgtaacttttggatctcccaaatcaatcatgttaaaaacacgcgtaatgataacatcacaaagccatccgacaaatccaactacgcaaaacgtgatataaaaatctcgccaagttagctgtcgtttaaataaaacaagggcaagaataaataaacataaactaacggtaatcggaaaccacaaaccatgtgcagataagtctaaatgctgaattgcttgcttcaacattgttcacctcaaaagaaagagttagtgttgaagttagcctatgttatggaaggtattttatacattttctacgcgttgcgtgtatattcttctcgcaagattgaatataactttaagtcttgatgagttcctttaataaacatggcttttcgaatcgttccttcataagacataccgatttttttcattactttctcagatgcagcattttcaacaaagcaccttgcctgaatgcgcactaaatccatttcttcaaatccaaacgcaattactttttcagctgcttccgtaacaaatcccttattccaatattcttcagaaatcgcatagccaatttccgcaatgcgatgagtagggttccaagtgacaaagtcaatggtgccaatacatttttttaaggctttgatttccatagcccaaggagaaatggattggttgctgtactgctttaaaacgaaggaaacaaactcttttgtatcttgaagctttcggtgcttttcccaatttacatatctgcttaccttttcatttgaggcatattcaaacatgtcacgcacatctttttttgtaactttccgcaagcggagtctttcggtttctagcgtgggtaaatttccgtatatatcttttacttgaatcataaagttgtctcctttctcaccaagaagtggatgaagtgtggataataatgtttcttagaagctgcagcattccaaaaatgcgctttctatttcatgtgcttgattctttaattgtaaaatatttcattggtgagcgtaagaggtcaaatgggtttttgaaaaataaaaaattattttttctgttcataatcagttcacatatgcttgttagactaaagtcagaaattacgaaggagtgaaatgaaacacatgaacagtgaagtgaaagaagaacgaacttcaaatgaaaaaagaatagacttatttttagttcccattgttttaattggagcgtttttgaacttatttaaaatttggacagatgaatacgccaacgcttattacacggcagctgtcaaaagtatgcttcaaagttttcataatttcttttacgcatcttttgatccaggaggctatgtaacgattgataagccgccggttgtattttggattcagacaattagtgccaaaatatttggatttcacggatggagcgtcattctaccgcaagcattagcaggcatcggttcagtccttttactatacgtactcgtaaaacgtacgtttggtgtatgggctgggagatttgctgctcttgcgatggctttgacgccaattgtaccggcggtaagccgaacaaataatatcgatagtatgcttgtgtttacattattagtagcgacgtggatgttatttcgtgctgtgcgcacagctaaatttggatgggtgttagctgcttttgcgatgattggtgttgcctttaatatgaaaatgcttcaagcatacatggttttaccagcattttatgttttttatgtagtggcaaccaaaatcacgtggaaaaagaaaatttcttttttaacaacagcaactgtactgatgcttgcagtttctgtatcgtgggctgttgtagtagattcaacttctgctgataagcgaccttacatgggaagcagtcagacaaattcagttctagagcttgcttttggatataacggtattaatcgtttaaccggaaatacaagcgtgacgggaagcagtcataagcagtctgctcaaactgagcagcaaacagcaagcagtgaaacaaaacaaaatagcaattcaagtgctgattcttcacaaagctcaaatcaaagaaaaagcagctcttcccaaaagatgcaggctccaggcggagggaatcaaaacggaatgttcaacacgggtaatcctggtcccttccgactattccaaaaagggttatcagatcaaatcagctggttactaccatttgtaatcttttcaatcgtgggtttatttgccggagtaaaatttaaaggaccttacacaacaaaacaaaaagaaagtttattttggttagcgtggctgctaccagtagctatcttctttagtatcgcaggatttttccatcagtattatttaattatgctggcacctccaatcgctgcatttgccggagcgggagcagtagctttatggagcatgtacaaacagcataatggctggaaatcatggctgctgccaggtggtattttaacaacagcagcacttcaagtatatattatgtctccttatgtcagctcaatcggcgtagcgccaattgcaggtgtaggagcactgggcgtcattttagctcttgttttagctgttcgtaaacagcgtaaaaattcgttgacgaactacctaggagccgcagcgatggttgtcttacttgcgatgccggcgtactgggcgatgacaccaattatttatggtggaaatagcatgcttccatcagcaggtcctgattcttcaagcggtatgggaggacctccaagcccagcaacgaatagcaaacagtctggctttaacggcatgcagcctccaggaagctctagcggcaattcatcttcaaacaatcaaatgcagccgccaagcggttcatcgaacggcggtcaaatgccgggtggttcgtccaataatggtcaaatgcagccgccaagcggttcttcaaacagtggtgaaatgcaaatgccaggcggttcatccaataatagtcaaatgccaaatagctcttcaagcaaatcatcatcttcaaaacgaaaaagtggagggatgaacgcagaagtaaacaaaaagctactaaactatttaacaaaaaataatacaggtgaaaaatatttatttgccacaacggattcaacttcagctgcaccttacattatcaaaacgggcgagccagtaatggcaatgggtggatttagcggttcagatccaattttaacggtaagtaaattaaaagccatgattaaaaaaggtgaagtgaaatatttctacttgtctggaatgggcaagggaggtcaatctgacgttatcacgtggattaaagaaaatagtaaggagattccttcttccaagtggcagtctacttcatcaagtgctcagcaagggccatctggaaacggaacactatacgaaataacgcttaaataaggagggcataaacatgagttccattgttaaatattctattgttgttcctgtctataacgaagaagaagtgattcatgaaacctaccgccgtctcacagaagtgatgcattcaacgaaagaagcttacgagcttcttttcgtgaacgacggcagtagagatcgaacagcagaaatgattaaagagtacagtgagcaagacccagcggttgttttattagactttgcccgtaactttggtcatcaaattgctattacagctggtatggattatgcaagaggagaggcggtcgttgtgattgatgctgatttgcaagacccgcccgaattgattttagagatgattgaaaaatggaagcaagggtttgacgttgtatacgctaagcgtacaaagagaaaaggagaaacatactttaaaaaacaaacggctgctatgttttatcgcttcttacgtgcgatgaccgatattgatattccgcttgatacaggggatttccgtttgctagatcgcaaagtgtgcaatcaaatgaatagcattcaagaaaaaaatcgctttgttcgcggattagtaagctgggtgggctttaagcaaatagcagtagaatatgagcgagacgagcgtttggcgggtgagtcgaaatatcctttgaaaaagatgctgaagctttcaatggatggcattacgtctttctcttataaaccgttgaagctagctagctatgctggtgtaacgctatctggtatcggttttatttatcttttagtggtgctgtatttgaagttatttacagacagcaccatcacagggtggtcgtcattaattgtcattcagctattctttagcggcatcattttaattattcttggtatgattggagaatatattggccgcatctacgatgaaacaaaaaatcgtccactctatatcgtccgggaaaagtatcagcttgaaccacgcaaggaagtatcacttcgtgactaacaaatggatatcttttattaaatttgcgttagtaggagttttaaatacactgattgattttgtagtgtacgcacttttaacaacaattggtgttaactatatactagcgcagtggatttcatacagtgcgggcattttaaacagttatgtcatgaatcgcaaatggacgtttgagagaaaagaaaaaagcagtaagcgtgaagtgatttcatttgtgatcgtaaatttgatcactttatctctaacatcatttctattgactgttctatataataaatggggggtagcgctgctactcagtaaacttttaattacaatcgtaagtgtcggtatcaactttattggtactaaattatttgtatttactactaaaaaagaaagagggattcatatatgacgataaaaaaagcagttattccagtaggcggtttaggaactcgatttttgccagcgacaaaagcgcagcccaaagaaatgctgccaattgtcgataagcctgctgtacaatatattgtagaagaagctgtgaaatcaggtattgaaagtattatttttattacaggacgaaacaaaaaatcaattgaagaccattttgataaatcaattgagttagagcaaatgcttgaagaaaaacacaagttccaaatgctaaaagaagtacaaatgatctcgtcaatggccagcattcactatattcgtcaaaaagagccgttaggacttggtcatgctattctttgtgccgaacagtttattggagatgagccgtttgccgttcttcttggagacgatattatgacttctgaagaacctgcgctcaaacagatgatccaagcgtatgaaacgactaatcaatcagttatcggagttcaaaaagtggatgttgaagaggtatcaaaatacggaatcattcagccgaaaaataaatctggcagccttcatgaagtgaatgacttgattgaaaaaccatcgatagaacaagctccgtcaactattgccgttatgggccgctatattttaaatccttctattttttcttatctaaaaacgattgaaagaggggtaggaaatgaattacaattaacagatgcactgggtgtggtatgtgaaaaagagcgattgtttgctcttgaactggaaggacagcgctttgatattggagataaggtaggctatatgaaagcgatggtagaagttgcgttaaagcgcagagatttacgtcaaacgtttttatcgtatttggagggaattgtagaaaaagaacgagcaaacaacttcagctaataagagttaatcagtttgttcatattcagttcatatttgaagtctaaaatcattgtatgatcttatgcggctctctgtttactataaacagagagcttactgtgcgtaaaagctggacaaacttaggaatagggagagacatgtatgattcaaatattagttgcagatgatgatcaacacattcgagagctgatatcattatatttagaaaatcaaggattcaaaattataaaagcagcagatggtgaagaagcgtgggcgaaaatggaagagtttcgaattgatctagcggtcgttgatatcatgatgccatttaaagacggatgggaactaacaaaggaaattaaggagtattttgatataccggttttaatggtaacagctagaggcgaatcgcatgataagctaaaaggatttgatatcggaacagacgactatgttgtgaagccttttgatcctcaggaaatggttgctcgtgtaaaggctcttttacgcaggtaccaagtagaagctaacaatgtaatctatatggggaatataaaactagaccgtaccaaattggagatgagtgcaggagaaacaagcgaacagctgccgttaaaagagtttgaattactgttcacgttagttagttctccaggaaagatttttactcgtgatcagcttattcaattaatttggggatatgattatgaaggcgatgagcgcacggtagacgttcacataaaacgtctgcgagagaggcttaatcatatgaaaaatgtcggtatggaaatcaaaacaattcgcggactaggctatagagcagaagggtgttaatgtgaaatcaatttatgtaaagctggttctgtcgttcatcattacaattttattgagcgttgtgattaccgttgtcgtcacgacatttcttagcaagcagaagctcgaaatgcgattaggtcaggatatggtgaagatgggagaagattttatcgatttgtacggagcagaagactccgacaaagctgcaaggtttttatctaattcatcattcattcatttttcgtttattattattgatgatgagcataaagaaaaagtattaggacagccaggaccccctattccaattacaccgaaagaagtaggtcaagtattagacggggagcgttattctaatttaaacgaggaaaaagatgatcgtccacagccaaacgtagtgggtcttccttttaaagaaaatggacggtcgtatgctctatttattcagtctcatccacagcggcaattttcagttattcaagatgttcaaaatatccagcttattacgattttattagtaggtattgtattatttgcatatgtttcaatgattattattaaaccgattaagcgtctcagtacagcgatgaaagttgttggacaaggcgaatacaatgtgcaagtcgagcacgcagcgaatgatgaaatcggtctgttaactaaaaattttaatcaaatgactaaagaattaaacaaaatagaaacaatgaggcaagagtttattgctagcgtttcgcatgagattcaatcaccgctgacctctattcgcggtttttcagcggcacttaaagatgatatcgtcagtgaagataaaaagatacaatatttaaccattattgaaaaagaaagtacaagactttctcagcttagttccaatttgctaaagcttgcttctctagactctgaacatcaaacgctaatgctgcagcaataccggttagatgaacaaatcaggcatgtggtcatggctttagaacctcagtggacaaaaaagaacatagaaattgaccttgatttatccaatgttcaaatagaagcagataaagatttgttagagcaagtttggctgaatttagtaacaaatgctattaaatatacgcctgaaaatggatttgtgaaaatatctattcatcaaaaaaacgaggaaatagacgtgaaaataaaggataatggaattggtattgccgaagaagatcaaaaatatatttttgaaagcttttataaagtagataaatcgagaacgttaaaaggaagcggcctcggtctagccattacaaaaaaaattgttcggctgcatgagggcgcagtacgtgttgaaagcaaaaaagaacaaggaagcatttttacggtaaccttgcctatccaaaaaaatagggctaaaaaagactcgtctgtgtaagttcatgcagatgagtcttttttattaggtcaaagatataaaaaaaattaataatatctatttatttttttaatccctacttgacatataggtaaagtgtaaataatatagatagtataaatcttttgaaaaaattgggatgctaaagaagctgatcggtcaaccgaaggctcatacttgttcgctactagtgtgggccttttctgtacattagttgtggtcattaaaatctcaatcttcaactgaacatatggggaggattaccatgtatttatcttctgcacattatacaagtacttatagatgttgttcgctttgtttattcaactgcaactaaaatataaatttatctatgaataggagaatgataaaatggcttcaattacacaagaaaaattagattatattgttaaattactaactgaaatcaactatggatctgtactaattactcttcacgatggacaaattactcaagtggacagcacggaaaaaaaccgctttttagctaaaagcaaagtagcaagccacaaataagcctaattaaatacgtatttagagaaactgaagggccagcctagctagcgaatgcttgacggcggggcaagcaagtactgtgctaaatatagaaaacgtgcgtattcgaattaaaattgactttctttccggtagaatatttagaatttttcgaattaaaattgagttataggttgtatgagtatgacgatgagaagtataaagcttctaaagcagcagctttatactttttaaaattatgaaaatctgacagtttcattcctgtgctgaccggattaccgaaggcttctgacctgtgttaggagtctttttttattcttaaattaatataataggaggagaaaagatggaaaatttattacgagcagcggtgcggcaaagaaaacaatacctcattgaagagttactgaaaaaagggatttacaaaaaagaaaaccatcatctttttgaacttacactctctgacttagaaaaagagtatctggcacgcagtaagtaaggaaagtacgtaaaaagaactaaaataagtgtaaaaaagattaaaaacccagttgactaataggtaaagtgtgtttattataaaaacaagaataaattgtcttttcagaaagtatcttctttttattcttacgaataaatttaataagaataatttaagagcatatacgctgatcagactaactgaaggctgcttctcttttcaaagagatagcggcctttttgtatttttttataaaaaggggagtaaaacatgaagaaaaaagcagttcagtttttaatggtgctaacggcactgctggtcgtgctagcaggttgcggcaatgggaaatctactgaaacagcagggaaagatagttctgcgagtaaaaacgattcaaaaaaaccagtagagcttttaaacgtttcatatgatcctacacgtgagctttatcaggagttcaataagagctttgcatcttattggaaagataaaacagggcaagacgttactatcaagcaatcacacggtggctctggtaagcaaggccgggcagttattgacggtttagaagcggatgtcgtaacgcttgcgcttgcatacgatattgatgaaattgctcaaactcgccaattattaaacaaagactgggaaaaagaattggctcataattctacaccatacacatcaacaattgtttttttagttcgtaaaggaaatccaaagggaattaaagattgggatgatttaacgaaaaaaggtacatccgttattacaccaaatccaaaaacgtctggaggcgcacgctggaattatttagcggcttgggcatacgcgaagaataaatataacggagataacaaaaaggttgaagacttcatgggtaaactttatggaaatgtcgaagtgttagactcaggcgcacgcggagcgacaactacgtttgtagaacggggcattggagacgtgttaattgcatgggaaaatgaagcttacttatcgttaaatgagctaggaaaagataaatttgaaattgtaacaccgtcattgagtattttagcagaaccgcctgttgctgtagtagataaagtagctgaaaagaaaggcacaacaaaggtagcaaaagcatacttaaaatatctatatacagaaaaaggtcaggaaatcgcagcggaaaattactatcgtcctcgaaatgaaaaagtattagagaaacacaaagatcaatttccttctcttaacctagtcaccattaaagattttggcggctggaaaaaagctcaagaaactcattttaacgatggaggaacattcgatcagatttatcagccaaagtaatatgatgcattaaaaaaaataaatgaggaagatacgaatggtaattcgtatcttctgtgtacatgtatcttgaaagcagagagaggtgtaagacgtgagcgtgttacaacgacagaagaaaaaggaaagtatcttacctggatttgggctttctttaggttttacggtgttttatgcaagtatccttgtgctttttccgttagcgatgatttttctaaatacggcatctatgggatggagcgactttattaaaactgttacagactctagagtagtagcatcatataaattaagttttggagcagcatttgcagcagggattattaatgttatttttggaactattattgcatgggtattagtgagatatcattttcccggaaagaggtttattgatggacttgtagatttgccgtttgctttaccaacggctgttgccggcattgccttgaccactctttacgttccgaaaggatggattggtcaattatttacgtttaaaatcgcatttacgcctatcggaattattatcgctctgacgtttattggtctgccgtttgttgtccgaatggtgcagccagtattgcaaaactttaatgcagagatcgaagaagcatcggctagtttaggagccagccgaatgcaaacattcagaaaagttatttttccagagctggtgcctgctattttaacaggcttttctctttcattcgcaagagcgcttggagaatacgggtcagttgtttttattgctggaaatatgccgatgaaaactgaaattacgccgcttattattatgacaaaactcgagcagtacgattatgcgggcgctactgctattgcatcagtcatgctcgttgtatcattttttctgttattacttattaatattattcaatggtggacaaatcgtaaatttgtacatagttaaggagggatgacattggcaggacatgttccaatgcagcatgcaaaaacgactgttaaacttaatcattctagtttaaaagagcccaaagtcgtccagtggctgcttacatttattgcactggcttttttagctctattcttagtgctcccgctcatcaccatttttatgacagcttttcaaaaagggttggaaacgtatctcgctgcgattacaaatccggatgctttggctgctattaaactaacgctaattgtggtgcttattactgttcctttaaatgccgttttcggcgtggtagccgcatggttaattacaaagtttgattttaaaggaaagaatattttaattacgcttattgatttgccgtttgctgtttcacctattattgctggattggtttttattttattatttggtgcacaagggttattcggagaatggttgtttaatcacgacatcaaaattgtatttgctattcccggtattatattagctacgctttttgtaacgcttccgtttgttgccaaagaattgattccactcatgcaagctcaagggtcagccgaagaagaagcgtcgttaacgttaggagccagcggtttcaaaactttttttctagtgacgttacctaatattaaatggggcttattatatggcattattttatgtaatgcgcgggcgattggggagtttggagctgtttccgttgtgtctgggcacattcgaggaatgacaaatacgatgcctcttcatattgaaattctctacaatgaatatcaatttgcagcagcgtttgcggtagcatctttaatgtcaattttagctatttttacattaattataaaaaatattattgagtggaaagtcaaacatatttaaaaaggaaggagcttatgaaatgagtatccatattaagcacgtatcaaagaactttggtgattttaaagcgctggattctattaacattgatattcaaacgggtgaattagtagctttactcggtccgtccggttctggaaaaacatctttgcttcgtatcattgccggtcttgaacatcttgatcaaggagctgttttatttgatggaaaggaaattacgcgcataaatccaaaagagcggaatgtagggtttgtttttcaacactatgctttgttcaggcatatgactgtgtttgataacattgcgtatggtttaaaagtacgacctaaaaaaacaaggccttctaaaacagacattaccaagaaagtaaccgagctgctgcagcttgttaaactagagctgcttgcaaatcgctatccctctcaattatcgggcggacagcgccagcgagtagctcttgctcgagcgttagcagtagaaccgaaagtactgctattagatgaaccttttggcgctctggatgcaaaagttcgcaaggatttgcgcagatggctgcgtaaattgcataatgattttcatattacgagtattttcgttacgcatgatcaagaagaagccttggatgtagctgatcgtattgttgtgatgaacaacgggaaaattgagcagattggaagtcctgaagaagtatatgatcatcctaacagtccatttgtgtacgattttttaggaaacgtcaatttattcaagggccgcattcataaaggcagactaaaacaaggaagctttgaaatggatgttccagaatttaacggaaggaatgaagaagcagctgttgggtatgtacgacctcatgatattcaccttgaaaaggtaaaaacaagcgcagatgctgtttctgcaaccgttagccatattcatgtgataggggctatcgtgcaagttgaattaaaaagagaagatgcagaagaatttttagaagctgaattgagcaaagagcactataaagtcctcagtcttcaagtgggagagaaggtgtatgtaaagcctaagcagctaaaagtatttattccagaagattattctatttaataaaaagcgtaaaggtatgcctttgcgctttttatctaacaataaattagtaccagatattaaaagtaggtgttataattaagtatcaactgatttgaggtggagaaatgatgcaatcaaaagctagaatcacaggaatggggatatatacaccaaagcaaaaattaacgaacgaccatttaaaagaaatggttgatacaagtgacgaatggattgtacagcgtaccggaatgaaagaacgacgaattgctggtgaaggcgaatacacgtctacgcttgccattcgagccgttgaaaatttgcttaaccgatatgctgtagaaatagaagatgtagatgcaattattgtttcgacaacaacgccagatcacttttttcctagcgtagcatgtcagattcaagattactttcatattgatcaagctgctgcatttgatctaggtgccgcatgcgccggttttacatatggccttcatgtggcgaacggcctagtgacgtcgggattgcataaaaagattttagttattggtgctgaagtcatgtcgaaaattacagattatacggaccgggccacatgcgtgctgtttggtgacggagcgggagctatgcttgtagagtacgatgagcataatccgagtttcttaggatgtcactacggaacggacggaagcggaggggtgaatttatatcgttctaacttatctaatactctttcaggaaaagaaattaattcgagcgggaatttagttcaaaacgggcgtgaagtataccgctttgctgtccgaacgattccaaaaggagtagaagcattattaaagaatacttccatttctctttctgatgtaaattggtttattccgcatagtgcaaaccttcgaatgattgaagctatttgtgctaaaacaggtgtttcaatggataaaacgttaacgagtgtgcaatactgcggaaatacatcttcagcttctattccgcttgctttaaacgaaggaataatgacaggaaaagtacagggtaatgacctccttattctttatgggtttggaggaggattaacgcactgcggtctgttaattaaatggacgtgtaaagaaaaaagctaaaaggcgatgccttttagcttttttgtcttttactgctaagaagaattcgataaaatggaaaaagaagtaaaggggggtgtgcatatgaatcacgttttatacattgaagacaatgaagaaattggattaatgattcaaaatgagcttaaaaagcaaaactatgaagttacttggttacaatcaggagatatcgccagtcggtttattaaacaagcggatattgtcattttagatgtaatgcttcctgggttagatggatttacagtgggaaaaaagcttaaaaaactagcacctgatgtcccaattttaatgctttcagctcgtacagctctagaagataagatcatgggactagagtttgccgatgactatgtcacaaagccgtttcatccagaagagctgcttgcaaggcttgaagtattgttaagaagattttcaagaaagaaagaagagcttattttaaaacatttgcatatttcgatgagagactatcgcgtgatgaacagagagacaagtgaagaaattagtttaacaggtaagcaatttcatatttttacttatttccttcagcatttaaatcaaattttaacaaaagaacaaatttatgaaggggtatggaaagagcgttatatagaaggagataaaacattaatggtacatattcgctatttgcgagaaaaattggagaaaaatgcagctaagcctgaaattattgaaacaatacgagggattgggtacagggtgaagcaatgaatgttacacagtctcttatcacgaaatatatcttaattatgattgcagctgtactaattatacctgtatcattttttgcaggctcatggctgatcaccgttccttttatgcatattcaaggattattaaatgaagagtataaaggaaaaagctactacgaacaaatatggaatcaagaagccaaaaagctagaaggagcaaatgagaaaacaattaatcaaaagctaaaattattaaaagaaaaataccctgaagcttcaatgttctgggtaaacgaagctggacaaacacagcttccgcttccttaccatgaatcccttccgaagcaatggtcatcttcttatacggctgaatttatcaaaaaacgatacggaaacgatccgtatacggttattacctttattggaacagataaaaagcaaggttttatggtcattgaagtgccggaaaaagccgttgagcctcctattcaaaggctagacccagcctactataatatttatttaggatttgtttttatcattgtgctttcttttattgtactttctctattcttttttcttcgaattcgaaaaaggctgcgagcgttacaagctgctatgaacaacaaagacgagcaaggaattcctttacctgttgtatctgagtccacggatgaaattggccagctagaacaatcgtttaatcaaatggttaaacagcttcatgaaagccgggaccgagagcagcaagaagaacagctgcgacaagacttaattatgagtctatcgcatgacttacgaacaccgctcacgactgttcgaactcatatttatcagatgaaaaacgaagaaatggccttgaacgttcaacaatctcttgaggtaattgatacgaaagtagaatttgttagtgatttaatagataatttattttcctatacgctgctgttaaatagaaaatatccatatcgggaagaggaagttgatatggctcgatttcttagaaaaagcattgcacaatggtatccactatttgaagaagagaatatggaagtggatattcaactgccttctcagtctatatattggcgcggagatgttcagtggttagaaagaataatagataatttatgtcaaaatgtcattcgtcatgccaaagaaggtaactttattggctttcgccttgttcaagagcatgatttatcttctctcaccatttctgataaagggtcaggctttaacaagaatagccatacgaagcaaaacggtgtaggtctagcgattgtggatgcgatgattaaagaaatggggttaacgtggtcaattcattctacaaaacatggaacggatattcaaattgtgtacaaagcgagtgattaattcacacgcttttttaaacgaattttaacctttcttttccttcctcttaactttagctgtttatagtaaaggagaggtgataaaagtggaaattgttaaaacgattcagctgataaaagtatttaaaggagcagaagctgtaaatgaagtgaatttatccattaaagaaggagaaatctacgggtttttaggacccaatggagcagggaagacgacaacgatccgaatgctgctcgggctaatgaagccaacgagcggggaaattgagctgtttggagaaagaataaaaaatcacaggcagcatattcaagccttaaaaaagataggttcacttgtagagagcccttcctattatgcgcatttaactgcgagagaaaatctagaggtacttcgcaaaatactaggtgtatctaaaaacagagtggatgaagtactaaatattgtaaaattaacaaaagaagcaaatcgtccagtcaaaggcttttctcttgggatgaaacagcggcttggcattgcttctgcactcctcggaaatcctcgtttattaatcttagacgaaccaaccaacggactggatcctgcaggaattcaagaaattcgttcattaattaaagaaatgccagggaaaaacggagttaccgtattgatttcaagtcatttactctatgaaatcgaccatctagcgactcaagtaggtattattacaaaaggaaagatgctatttaatggatcgattgaatcgcttcgcaaaaaggctaagcatcaagtggcatttacaacgggagagatagaaaaggctaaaacaatactattagcaaatgggtttgtacctactatcgataaacacagtcttcttttagattatattgatcatgagcaagtggcccatcttgtttatcagcttgtgcaagaaaatgtctcaatctaccgagttgaagaaaaatcgaaatcattagaagatatctttttaaagctgacgagtgaggagaatggatatgttcacaaaaatactgcaggctgagtgtataaagttaaaaagaaaatggctccggtttttactatttttaggtccagcgggtgtaattggcttaacgctagttgattatagcgttcgatatgaatatttaattcagcaaaacccgaacgtgtgggaaggtcttttgcatgaactaaacatcacgcttccaatagcttttttactgggaggaacgattcttgcttcaaatgtagcacatattgaatatcatagaagctcatggaagcagttgctgagcttacctgtgagcagactgagtgtttatacagcaaaatttgtagtagttatgtttatgctacttatcgcttctgctgttctattaatcggtataattgggctagggtggtggttaggatttggtctgcctccttcttggaaaactctttttgtttataccttttatccgtttttttcggctattccgtttgtggctattcaaatatggctatctatgctttttaaaaatcaaagccgttctctggcactaggtattgtgatgagtgggacaatgagtggtatgagagaattgccgagctggtttttctggcaatggccaatgctagtgttttccgattatcggaatacgtatatgataacaggtgtaattatcggcgtttttttatatgctgcaggtgctcttcactttatcaaaaaggatgtggcctaaatgttgtggcaattatgcaagatagaatggtttaaattgtttaaaacaaaagcctggacttacctttttgttagtcccattcttattgctgctatcctttttgtaggtgatcaggcaatgccaaacgggaggatgaaatggttaatggcagatgctttgattgccaatgttcacggcttactgttttatccgttaattggcgggttagtaacatcgttcatctgtcggtatgaacacgaagccggagggtggaagcaattactatctcttcctgtgacaagaacatccgtatacggagcaaaattgatcacatcagcagctttcatgggaattcttcaagtgcttgtatttgttgttttattaggagttggcatgttgaaaggctatccgaatgctattccactaaaaatgatagctggaaatatgctaggcggctgggttgcagtgttgccaattctagcgtttatgctagctgtgtcaatggcactttctagctttggagcatctttaacagtcaatgtcattttaacactaccgaatttattcgttgctaattctgaacgatttggtccctggtacccatggactcagccaatgtatggaatgttaggtgtaacgggaaaagcatcatgggggttgatgctgactacacagaacttcctagcagttgttataagcagctttctgctttttggagcagcaggtttactgtattttcagcgcaaacatatataatagaaaaaacccgcttttttatagcgggttttcagccggcttttggaatggtaaaacctactccaaagacgtcgcgcacatcgtgtacgaccacaaaagcttgttcgtcgactttatgaataatacgctttaattctagcagttcttgtttgttcacaactacgtacaatacgtcttttgcttcttttgtatagcttccatgagcagaaaagacagtgacgccgcgttgcatctttttattgacttgttcggctacttcagctgaacggtgtgaaataatagtgattgctttgcgagggttgagtccttcaatgatataatcaagcaccttcgttccgatgtaaagagaaataaccgtatacatcgtcttttctccaccgatgacaaaataagcgcttgctacaactaataaatcaattgccagcatcgttttgctaatattccagtctagatattgattagctaagcgggcaataactgcagagcctccggaagttccgccacctctaaacacaagtccgagtcctacaccagctaaaataccagcaaaaatagctcccagtagcgtatcgtcaagaggatttcccagtccttcagttatatgtaggaatagagatgtaaaaataatacatataattgtgtaagcaatcacacgtttgtgaagcaatttgtatccgatcagtaccagcaaaccgtttaatataaagtttgtgatacccggagaccagcctaatacataataggtaatcattgttacaccggttacgccgccttctgctaattcatttggaatagcaaagtaattaatggccagtgcgaaaatgaggctccctagaataatgaggataatttcttttattttattaatcatgaacgttacctccaatcatcaaaagctccgaaaacacagtcatgacaatgtattataccaactctagagaccgaattaaagatgggatatcattatttttttaaaatcagtttctgctattaacataaaatcttttgacagtttttatggagtatgaaagaatgaattgtttgcttttattttgattaaaaagttttgcaatgagaatgttcgttcggtaaaatagaagcaagagtcaagggggagaatgaacgtgtatcaagatgaattaaaacagtatgcgaagttagtaatgcccgagcatttagagaaaatgaagaaaatgtacagtcccgatgcgcataagcagcctttagggttgagaaaagaaaagattgagcatattgaaaatgtcattatgaacagttactcggagcatcatccagtaacacttcacgtctatgaagcaggacatattcaaaggtatgaacgagtgacgattgataaagtctcgctgcagtcgaatacgctgatggttacaggcccttgttatacatattcgattcgagcggatgcagtaattgaagcagatgtatggaaagatgaaagctactctagctaagagtagcttttttgttcgttttgtatcttttttttaacgcatgcatacaatacataaaagtatattctgcgagtagcaacttctagctactaggaaattttaattaaagaagggattattgtatgcaaaatgaaaaaacccaagtaagagaaatcgaattaacgcagttcattaaaaaaagactcgttcgttttatctcaagtttagctatttcttctgcccttgcttccatattatatatgcttctgtttttatttaaatgatgggtcactttgagttgtccaaaaaggtggacaacttttttggtgtgtaagcttttatgaaatcaggacaagctatgcgtgattcagtcagaaaaattcaatcggtcaagaaatagtcaaaaacagtcatagctaattgggtagaagaaaacctttacatataatgagaaaagtagacaaattcttgaattaccagcttatttccttttgtataaactatcattaaaacaaatgcaaaactaattattcattcaaaaaactttattttgtaattaaaaaaatgaatgtttttgattttttatgattgattttgaatgtaaaccgtgataaagtaagtacatgaaataaatgaaaacgcttttttgaaaaaggagctagaacatgttaacgccggagagacatcaactaatcttaaaacttttaaaagagaaagaacttgtaaaagtgcaagagtttatcgaagttacaggcgcttcggaatccacaattagaagagacttaagtcaactagaagaagagcaaatgctcaaacgtgttcacggtggcgcttcgcttattcgcagtaaacgaattgaactgagcgttatcgaaaaatctgctaaaaatgttcaagataaacgaaacattgcagagtatgcggcttccattataaatgaaggtgactgtatttttttagatgcaggaactacaacgtatgaaatgattccttttttaaagcaaaaagatgtagttgtcgtgacaaatggtttaatgcatttaaacccgatgctagaacaaggtatcaccctctatttaattggaggatccgttaaacataaaacgggcgctttaattggcaatggagctcttttaagtcttgagcaatatcgttttgataagtgctttatgggagcgaatgggattcatcatcaatatggatatacaactcccgatccagaagaagcattaatcaagcaaacggcaatgaagctgtctagagaatcttatattttatcagattctactaagttttttgaaacaagttttgcgaaaatagccgatttacatgaagcaaaaattataacaaatgacgtacctagcgatgtacttatacagtatgcaaacaaaacagacataaaggttgtgaaatcatgatttatacatgtacgttgaacccatccgttgattacgtagtacatgtttcagcattcgaagaaggcgggcttaaccgcacaacgaatgaagccaagtttccaggaggaaaaggcattaacgtctctcgcgttttaaagcgattaggtgttgataataaagctctcggttttgtagccggctttacaggaacctatattgaagactacttaaaagcggagaatatcgaaacagcttttacaagagttgatggagatacccgcattaacgtaaagttaaaaacggaaaaagaaacagaaattaacggtcaaggacctgctattacagacgaagcgcttcagtctttattgactcaagtaaagcaaatgactgaaggcgatatcttcgtattagcagggagtataccgaaaacgcttccaagttccgtgtatgaaacattaactgaactagctgcagcgaacggagtaaaagttgtagtagatgcaagtggaaaaaccttgctagacgtcgtgtttcacaagccgttttttatcaaaccgaatcatcatgaacttgcagaattgtttgatgtagaagtaaacagtgcagaagatgcgctagtatatggtaaaaaactcgtggaacaaggagcgcaaaacgtcgttgtatccatggcaggcgatggagcacttcttattaacgaaagcggtgtctacagtgccacagtccctaaaggaacagtgaaaaattctgttggagctggcgattcacttgtagctggatttattgcttcttatgtaaagcaaggggatttattagaagcctttcaaacaggagttgcttcaggaagtgccacagcattctcacttgaattatgtacagcagaagatgtaaagacgcttcgtgaacaagtgtcaatcacaaaggtagagtagggggaaccgagaatgagaattacagaactattaaaaaaagatacaatcattcttgatttaaaaagcacgtcaaaagctgatgttattgatgagttagttggaaaattagacgaagctggtcgcttaagcgaccgagctggctataaagaagcaattttaaaccgtgaatctcaaagtacaacgggaattggggaaggcatcgccattccgcatgcgaaaacaagctcggtaaaaacgccggccattgcatttggacgctcaacagaaggtatcgattatgaatcattagacggacagcctgcacatctattctttatgattgcagcgagtgaaggcgcaaataacgctcacttagaaacactatctcgtttgtctacgttattaatggacgaatcgttccgaaaaacgttgctaacggcattatcgattgatgaagttattaaagcaattgatgataaagaaactgaaaatgaagcgccggaagaagaagtggatacggcttcagatcaattagtgcttgctgtaacggcttgtccaacaggaattgcccacacatatatggcagcggacagcctaaaagcaaaagcgaaagatatgaacgtgacgctcaaagttgaaacaaacggttccagcggggttaaaaacgcgttgacgaaggaagaaattgaaaacgctaccgctattatcgttgcagcggacaagcaagtagaaatggaacgttttgcaggtaaaaaagttattcaagttccagtagctgaaggaattcgcaagcctgaagaattaattaaccgcgcgttaaaaggagatgctcctatatacagcggcggcggtggcagcaaagaaggcggagaaagtaaaggatcagagcgtacagggttttacaaacacctaatgagcggtgtatcagcaatgcttccgtttgttgtagggggcgggatcttaattgctatttcattcatgtttggcattcactcagcagaaccgaaagatccgacgtacaatgcatttgcagcggcgctaaaaacaattggcggagataatgcattctttttactagtaccggtactagcagggttcattgcaatgagtattgctgatcgtcctggtttagctcctggtatggttgcaggtcttttagcagcttctggtggaggcggtttcttaggtggtttaatcgctggtttcttagcgggttatgtagtagtgggattaaagaaattattcagcggtttaccgcaagcgcttgatggaattaagccagttcttctttatccgctatttgggatttttatctcaggattgattatgctttatgttgtaaacgagccagttagtgcaattaacaaaggattaacgcactggttaagtggatttggtacaggtaacttagtattattaggtattatcttaggcggtatgatggcaattgatatgggtggccctattaataaagcagcctttacatttggtattgcaatgattgatgctggaaactatgcaccacacgcagcgattatggcaggcggtatggttccaccattaggtatggctattgcgacaactttgttcaaaaacaaatttactcgccaagagcgcgaaacaggtaaaacgtgttatgtaatgggtctgtcatttattacagaaggtgcgattccattcgcagcagctgacccaggccgtgttattcccgcatcggttatcggtgctgcagtagcaggtgctttaacaatgatgttccacatcggtttaccagcaccacacggcggtgtattcgttatcggaattgtacaaggaaatcctcttttatatgcactagcaattttaattggtgcaattgtaacggcggttcttgtaggggtattaaaaaagccaaaagcagaataacaaataaagactgattttacatgatgtaaaatcagtctttttgtgtttttctggtagacatttgttctctatgagagtacaattacggtagtattcctttaatttttagaaaagttagatagatgagcttttctacttgataaaatatggtacaataatcgaatattaaaaacaaagtaaggaagtgtctcacacatgaaggttgcgaagtttggcgggagttcagttgcaagcgcagagaaatttaaacaggttgcgcatattgtaacgtctgataaagagagaaagctggtagtcgtatcagctccgggtaagcgatacggagaagatacaaaaatgacagatttgctaatcgcactttctgccaaaatacagcttggagaagattacgtagacgagtttgggcaagtaattgatcgctatcgtgaaatcgttgtggacttgtctatgccagaaacgattattactgacattattacgaatttacaatcacttattgatttacataaaaacgatccatttcgcttattagactgcctaaaagcaagtggagaagataataacgcaaaggtaatggctgcttatttaaaccatttaggttttgaagctcattatgtaaatccaaaagaagcaggtatttttgtttctgatgaacccggaagagcaagagtgcttccactgtcttatgaaaaattaccgcagctaagagagcgttcgggcattttggtgattccaggattctttggctattctgaagaagggaacatggttacgttctcgcgcggtggatcagatatcacaggctcaattgtagcagcgggagtaaaagctgatttgtatgaaaactttaccgacgtagatgctatttatagcgtagatccaagacttgtggaaaagcctcatgaaatgaaagaagtaacatacagagaaatgcgtgaactatcctatgcaggtttttctgtcttccatgatgaagcgctggagccggtttataaactaggcattcctgtatgtgtaaagaatacaaataatcctgaagcaaaggggacattcattgtagctgagcgtcctcacggagatacgccggtggtcggaatcgctggggacaaaggtttttgcaatatccacgtgagcaaatacttattaaaccgtgaaattggttttggcagaagattgcttgaaattttagaggatgaaggtatttcatacgaacataccccttcaggaattgataatatctctgtcatcatgcgcgagcatcagcttacgccagatgttgaaaagcgcgtatttgctcgaattgaaaaagaacttgaggtagatgaaatctttattgaacgtgatcttgctatggttatggtagtaggagaaggaatgaatagcacagtaggaattgctgcaaaagctacagaagcttttgctcgtgctgaagtgaatcttgaaatgatcaaccaaggttcttctgaggtgagcatgatgtttggtgtgaaagcagatgctttagaccgtgccgttcaagctctttacaatacgtattttaacagcatgtacagtatttcttattcgaatgtaaaataaacaagacgaaaaacccccctttctttttagagagcggggttttctagtgaaggcgtataaaaatcaaatttgtggacataaagggaaggaagagtgaagtcaaaggaggaaatacagtgaagaaacgaccctttttcatattcttttcccttataagtattagcgtactttcagcatgccacaatgatgatgcagcaccagcaaaagaagctcaaaataaacaaggcgtgacgaatggcggaacgccgatgagctatgataatcaaagcgaaaacacatcttttaacttttcaaaatttgatttagaagtagattataaggggctcaacaatgattatgaagccgactacgaaaatgaaaatgatgagatagaagccaaagtggatgataatattaacgatgagcacttgaacggagataaagcttttaataaattatcttcaaaatttaaaaagttaaattttgatcagcgcacgcccgatgaagatgtaaaaaaggaagtaatcgatgcgtttggtctaaaaaaagattttcagtcgtttgaattagaagttcgtttttcaaacggaacggaaaaagaatacaactttaaacagaagtaagacgttaaagtaaagtattttagttgaaggaaaatccgaacgatgaatcgaggttcttcattaagaatccaactcgttccgattttttcattggcaaggtgaacgtatgtctcaatcttatttttgatgtctaaaaaaaggaaaatagtgaaaggatggtgataaataagaaaaaggaggaatcacggatgcaaaagttgataatgaacggatgcgtagtctttgtgctgttattgttaggagcatgcagcatggtaaaagagcaaaataacgctcatgaaaaccacctgaaaatagaggaagcgaaagaaacaagcgaagtatcagtagaacctgttaaagtggatttaacaaatacatcgggcaaaaaagtaggagaggctaccctgtcagaagcaaagaacggcgtgcacattaaattaactgctcaaggtctttcaccggggagacatggatttcatattcatgaaataggaaaatgtgaggtgccggattttaaaacagcgggtgcccattttaatccttttaaacgtgaacacggccttaaaaatacaaaaggcccgcatgcaggtgatttgcccaatctagaagttgctccaaatggcaaagtagatacagaaatttttgcttctcttgtcacgctgcaagaaggaaagccgaattctcttttggatatggatggatcggcattagtgatacatgataaagtcgacgactacacaacggatccttcaggaaactcaggagatcggattgtttgtggagtgattataaaataagccaaaaagctgtgagatcattcacggcttttttatttcagtaacgagccgcttctaaattgcggtgagcttcttttttttgcacaatagaagaaagagctaaagaaggtgaaaacatgcataagcaagttgtcgtaataggcggaggaataggtgggttaacagcgggagcgcttttagctaaacatgactatgaagtgacggttttagaagcttctcgagaatggggaggctgtgcagggaaatttcagcgtcatttgtatacgtttcctgttggggcgacgcttggaatgggatttgagcacggagggatacatgagcgaatcggcacgtaccttggcctagaaattgaaaaggtttctcttgagaaaatcatgaaagttcatcttcctcatcgtacactgatttattatcaagaccggtatcagcatatttcctatctccaaaaacaatttcctcataaagcaaaaaatattaggagtttttatgaaaatgtttttagaattgcaaaagaaattcgcaagcttatgcagtctctgccggttcttcctcctctaacagtcggtgagtggagcaggctggtaagttcgttgaatgttggttctgtgaagctgttgccttattttcatcaatcgtttagttatttactaaaaaaacacagcttgttagacgaagcggactttcttcattttgctgatggtcaattaatagacagcatgcagacaacgagtgagaactgttcaatgcttattggatgtttagcgttagatatttatcacgaaggtgctttttatgtaaaaggtggcttatacaaagtcgcagaagcgctgcaaaaatcgattaaagtcaacggaggaaaaacgattctaggaaggaaagtagtaaagatagagcgtgataatgacgggtggatcgtgcatgatcatagaggtaatcgttactgggcatcagacattgtatgcaacgcgccggttcaaagcttaaagtctttgctgcatgatgaagattaccaacatattcataagcgagcaaaagaaaaaagcgagctttcgcagtggggaacgttttcgatgtattttgcgattgatgaaagagatctgccgcaaaaggtagagttgtttcatcaagtacttcaatccgaacaaggggaaatgacggaaggaaatcatttatttctctcagtctctcatcctgatgatcgttttcgagcgcctgaaggcaagcgtacaattacagcgtctactcacattgatcttagcaagtggagtaacaaagaagcctatgaccttcaaaaacaagttcttgagaaaaaaatggtagcaggcattaaaaccattattcctggcattgaaaaagcagagcatcaaatttcgggagctcctaaagcatgggaaaggttcacctctcgcccaaacgggggagtgggaggctttccgcaaactttagatcatgccttgttcaacagcatttcgcatcgatctggcttacaaggactgtggttatgtggagatacagtgtttccgggagcgggaactataggcgtatcggtaagcggctatcatgtgtttcaaagtataacgtctcatcgccatacgttaccttaacatttcttacatacaaactactattgttcatactattaaaaaaacaccggccctattaccatagggccggtgttttcaggagaggaacagcttccaccacttccgttttcgcttcatatcagcagcggcggtttgtctaaaggtttggacaaaatcactaaacatctcttcgcgttcagctacgctttgacgatggagcttacgctctttctccatttcttttaaataatagactcgttcctcgttcattgaatcaattaaatcacgaagctcttctgtcgtattggttgaagaattgtttaatttttcaaccataaattttacttgattcatcgcaacggtggaattactggagaatcgatctaataaatactgcatttctttagaggattcatccgcattctccatgacatctttcatgaaaaggcgcatatcctcggttttctcttcagcgattgttgaataatcttcaatcaaagaagtgacttcatcaaacgatttttcgttagaacggataatttttttagacatattttctacatctcttgcgctgcgttctgaagactcagagatatatgccccaaccgactccaccatttctacagtttgggtagcgcttttttcaagctctctttttacttctccgacaatttcttcgcgaacttcatttcgcataccttctcgcatttcttttaacaaatcagctttaaatgtatcaagcacttcaaacacatcttcatagcggcgaacagcttctactaattccccttgaagcagttctttttcattcacaacaaggtcgtttggttttggctcttcaatagaagcagaaatagcctgcttttcttcttcagtagccaatcgtgcttcaggtataggaggggtcttctcttgcttattttctgaaatgctttcctgcttttcagcagcttttttcttttcttgcttcatttgtttattggaatgttcttgaaaatcaatgacgttttcttttttagcagttttcaactgtgccggttcttcttcttttgaaaccgctgcctcagattccatcactaaatgctcctgttcttcttgttcttttatcagcagctgaacgtattctttgacttcatctaacgtacattgttcatcaaacagctgtttaatatcattaaataattcaatttgttcctctgtataaacacgggcaccatctactcgttcaattgttaaatagctgcccaataatttttcccattgttttagcgttttcttttctacctctaattgatcacttacttttttaattgtatatgtctccatcatttttcatttcctcccttatctattttcatccaactatgtaatggattatttgttgtatgttgtattcaccatatcttcacttgttttcctgctaggtgacaaaggttgtcaaaactagacgacattagccttctatgtaaagaaaacgcatattttgtaaaaaaatgtacataaatgcgtaaatggcaaaaatggaaaatacaaaagaaaagaagagtatagaaaacagttgacgggaaaaaatgaatcctataagataagtttaaatgtttaagttcttgaacatttaaacataaggagtgaacactatgtcacagcattatgcgctcatcaccggtgcgtcgggaggaataggtaaagagttagcttatcaattcgcaaaggatgggcatcctgtaattttagttgccagaagcgctgataaactagcggctattggagagaatttaaaatctacttataatattgaagtcataacggttgttaaggatttatcaagagaagaagagatacagtcattatatgaagaacttaaaaataaaaaaatgcacgttgattatttagtgaacaatgctggttttggactatacggcaaatttattgaaacagctttagatgaagagttaaacatgattgatttaaatattcgagcattaactcatttaacaaaattatttttaccggatatgatcaaaagaaatcgtgggaaaattttaaatattgcatctgttgctgcatttatgccaggtccacttatgacggtatattacgcaacgaaagcgtacgtattatctttcacagaggcccttgaaaatgaattaagaggtaccaatgtaacggtaagtgctctatgcccgggtccaactaaaacgggttttagcgaccgagcccagctaagcaactccaaactttttcaaagcggtgcaatggatgtagaaacagtaacgaaagttggctataaaaaatttatgaaagggcagacggttatcgtaccaggagtacagtttcgtcttgctacgttcatcccgcgcttcgtgccaagaaagtggcttacatccgttgtccgcagaacacaagaaattaaataaaggagaatctatatgagtgaaaaagcagtcgagttatttcgtgccagcattcccatttttcaggctctaagtgattcagcaagacaagatattattttgctgctcgccgaaaaagagcctttaaccgttaatgaaattgcaaacgagtctactctatcacgaccggcgatttctcatcatttaaaaattctacgcgatcaaaagcttgtgcaaattgagcaaaaaggaacgcagagatattattcattagctttgaatgaggcagttgagctattaaaaaacttgcttgctacagttgaagccgaatgtttatagggagatgaaaggaatgaaccacgagcgattctatatcacagatgaaacagtcattgaacatattgtttctacacaaaagcagtatttctatgcgcaaaagacaaagagtatcagcagccgcattcaagcgctgaataagctaagagacgcagtcaaacaaaacgagcagagaattatggatgctttaaaacaagatttaaataaatctgaagtagaggcttacacgtcggaaattgggattttactagaggagattcgatttacgcttaagcatttagcaaaatggatgaagcctaaaaaagtaaaaactgctttaacacatgtgggctctaaagggaaaattgttcctgaaccgtatggagtcgcgttaattattgctccgtggaactatccgtttcaattagcactgtctcctttagtaggagcgattgctgctggaaacacggcgattataaaaccttctgaattaacgcctagcgtatctcgcgttatacaagaattactggctgaagcttttgacccagcatttgtgacggtgattgaaggcgctgtagaaacgacaagcctgcttttaaaacaggcgcttgattatattttctttacgggaagtgtaaatgtagggaaaattattatgcaagaagcagggaagcagcttattccagtcacgcttgagctaggcggaaaaagtccgtgcattgtacatgaagacgcaaacctagatcttgcagcgaagcgaattatgtttggtaaagggatgaatgcaggccaaacgtgcgttgctcctgattatttgctcgtgcataaaaaagtgaaagcgcagcttgtagagaaacttcgcgaagcaatttctcaattttacggtagtaatccacttgaaagcaaccgctacggccgtattgtcagtgagcgtcattttactcggctagttgagtttttaaaagacggaaatgctatagttggaggcgggtacaataaaaacacgctaacaatagaacctacggtgttaagtgaagtaagctggacatcagatgttatgcaagaagaaatctttgggcctattcttcctatgattgaatatgaaacactagacgaagtcattcataaagttcaagaaaaagctaagccgttagctctttacttatttacagaaagtgaagatgtgcaaaacgtgataacggagcgcctttcatttggaggaggctgtataaacgatacgcttatgcatatcgctacgccatatttgccgtttggcggagtgggagaaagcggcacgggtcaatatcatggaaaagacagctttcagacattcactcattttaaaagcatgctgtctcaaacaaccaagtttgatttgtcattccgctatccttcggaaaaacaaagcttgaaaatgatcaaaaaattattgaaataaaagagcctcctgataggaggctttttcgttattttgaaagtaaaagctgagaaagcggccatttttcttgggtatatgccatttcccaaaataaatactccagttcacagcttttgatgaagtgatctttcatacggttacgttcttcttcagtcgcttgttcggcgagttcatcaagcttgttacaaaaccattgtgttgtgccattcatttcttcattattataaaactgaatccattcataaaaaggatgagaaggagatggatttacttgttctgtaatgcgctggccaatttcaacgtacgtccatggacatggaagaagcactgcaatgatttctgctaagctgcctgtatgcgcaacacttgtcatatggttaatgtagtggctggccgtcggtgaaagcgtctcagtgtgaaggtcttcataacgtacgcctgctacttcacaaaaattattgtgagggtgtacttcactatgtaataccgtagaaatgccggcattaaaggcttccatttcggtacgcgtgcggcattttgttaaagcagcgccgtaaatgcgaacaaatgctgttaagtattcgtaatcttgagaaacgtagtgaataagcgcttcttttggcacgtttccttcagcaattcctttaataaaaggatggttaaaaatggcttcgtaaatatagtttgcttcttgtcttaattgagatgaaaatgacatcaaaatcctcctttaatatgaggaagtcacaaacaagcacataaaggaaataaaaaacactccgtttataaacggagtggcaaaggacagtaaaaaactgaacattgccactttcctacgctggtatgagccagatcaggttcaaagggatcaagaaaacttgtctcagccggtggcacccctagtggacttcctattaatctacgtttaacttaccatatattctgaaaaatagaaagcgttatggggaattgtgtgctaataacttttctttcttaaagaggaaatttcttaaagctatttttaatcatttttggttaaaaatgcatatttttaggggagaagaggtattaatgaagggaagagccgttttcgtctccgaaacactcccatataaatagaagaaaggagagaacaaaatggcgaaatttcgtttgtatgctgtattaaatacagtaggcttggctattacactacttgtgaattatttagcaaatgccattccaataggaggcaaaacaacgggagaagcttctgcgcaagttcctacgttgtttacaccagcgggttatgcctttgctatctggggcgttatttatttattattaaccatttgggttatacgccaattttttgcaagagaagatcaaaaggaaatatatgcacgtatcggcatttggttttttctaaactgtttgttaaatagtgcgtggatctttattttccaaaacgattactataagttatctcttttagttatgctctttattctaggcacattaatgattgtgtattccactattcagcattctcgaatgacgacatggtttatgcgtctgccgatttcgctttatcttggatggatttctgttgcgactattgtcaatgtgtttgtcgtatttcaagcaaatggaatacagcacttgattggcttaaacgagttaacatggacgattattatgctgctggtaggagctgtgctgggcattatgtttacattaaaaaaccgagacgctgtttatccgcttgtttttatttgggcttatattgccattgcagtgaagcaaagtggaaatcagccaattgtcattactgtcatcattttagttgttttattagcaattgccattattgtgggattgattaaacgctatagacgtttttaaaaagaagctctagcttttgtaagctagagctttttatgatgctcttttgattgtaaaaaagcagctgtaaaagcaattaagctaattaaaataccaaaaggaacaacaattggtacgaatgataaaataaatgtcataagtgtaacctccatgttgcatcggtgcataatgaaaaattcaacttttttaaattgaagttccgctactatagtatgctaggctttatgtttggagcctatatgtttagaaataaacgaaaaaggcaaaatacgttacatataggttatataggaggagttaaaatggaaacatatttagttgcttacacagataaagatgatatggaatataaacaagtgacatgcgagagctatgaagatgcagagcgtacggttcttcgtttagagagagaagggcatatgcatattgaagaaatatcaaatcaagaagcctatcgcggagacgaatcatcgtacagagaatgatttttgaatagaaacatcaaacttaaaatgaagaagcagctgcttcttcattttttctattctatatagatatcgttttatagaaaaaagtaaaacgggaatgattttcttctgcatttatggtacagtactaatcaggtgagttttgagtttagaagaggagagagtaacattatatgagtaaaggaaatcagtggtcttcacgcctcggttttattttagcatctgctggggcagcaattggtctaggagcgatatggaagtttccatacgtaacgggaaccagtggcggtggagcgttttttgcgttgtttattttatttacgattttttttgggttgccgcttctgttggcagaatttatcattggaagacatacggggaaagaagcgattagtgcttataaggcaattgctccaaaatccgcttgggtatggattggcaggctgggagtactaagctgtgtcattttgctttccttttacagcgtcgttggcggctgggtgattttatatacgattatgagcgtaaccggtatgctaagcggaaaagagtacggcccgttgttcaatgccgtcattagccaaccttatgtagtattaggtgcacaggcgctgtttttattaattacagtgtttgttatttcaaaaggcgtacaaaaaggaatagagcgtgctaataaatacatgatgccgctgttatttatctgttttatcattatcgtggtgcgttctttaacattagacggagcaatggacggagtaaagttctttttgaaaccggatttttcagccattacaggggcatctgttctctatgcgctcggtcagtcgtttttctcgctttgcgtgggattatcctgcatggtgacatatagctcttatttagggaaaaaagtaagcttgacacgttcagctggtactattgctcttttgaacttgtttgtttcgctgctggcgggcttggctatttttccagccgttttttcatttggattaaagccaactgaaggacctggacttttgtttgtggtcttgccaacagtatttgagaaaatgccgtttggtaccgtctttttagcactgtttttaattttatttctatttgctacgcttacgtctgctttttcactgctggaaattatcgtagctgctttaaccaaagacgatcagacaaaacgaactcgctacgcttctttatcagggattattgtgtttgtggtaggtatcccatcagcgctttcgtttggtgtactaaaacatgtctcactttttggcagaagtatatttgacgtagctgacttttttgtgagcaacttaatgctgcctctgggaagtttagccattgcgatttttgtgacatttaaaatgaaaaaagaagccgtgtatgaagagtttatttcaggaagtacaaaaggcgctaaattattcaacgcatggttctttctagttaaatacgtattgcctattattattatagctgttctattaagcttacttgttgcatattaaaaaaagcactcatctgagtgctttttttgtttattttgcaaaaacgtgatttccgattgtaatcgtaacctgtttttgacgaagccattggtcacttgttttatctggattaaagaagaataacgaaccttttccttggcctctaaaagctagtgcttcattcacagctttttttgcttcagcatccgctgctttattgatttcaccgttttgtacgggtgtaaactgtctaccttgataaatcacatcatgaatagaatttgggaaagaatcgctatccacgcggtttaagacaactgttgctacagccactttgccagcgtaaggttcgccttttgcttcagcttgtacaaggcgagctaacaattctttatcactttcgctaatagagttagggattgttagtgtttcatttgcattaatagagtcggtagatttgtgattcgcttcttttaactgttcaaccgtaactccgtattcagcgccaatcttgtaaagagtctctccagcttttacgcgatgggttgtttcagcggcatttgccacgtgactcatgccgaacataggaactgctagtgctccaataattactagtttcttaaacataaagtaagtacctcctgaaatccttttgaacgccccttttatcacggatcggtgcgtgctgtgcaccgaactttatatgtacgtttcaaagattaacaggtgtcaatacatcttgtcactgcttaaaacataccaatctaggaagaaattataatagttaacagataatttgaaaaatacgttgactgataataaaggagtgaattataatgaacgagtaaatagttaaccgtttaactggagagattttatgggagaaaagataacgattcgtgatgtagcgaagcatgcaggagtgtctgcagcttcagtatcttacgtcttaaacggaattaacaaagtatccgatgaaacaaaagagcgaattttaacagcggtaaaagaattaaactacgaaccaaatttaaccgccgttagtctttcgaaacaaaagtcaaatatgattggcgttatgttcccgcttaccgatgattcactttctactatatttaaagataaccattattacagtgaaatgattagtggaattgaatatgtaatccgtaagcatggttatgatctagtcatatctggagcgagtagcccggctgattgcctaaaatggattcgaacgagaaatattgatggtcttctgtttttaggagccttcccgcatcgattgtatgagaaaatgaaagcgttatcgaatccgattgtgctagtagatacatatgaaaggtacgaacgtgattatcatcatatttctgtagacgatgagtatggaggatatctagctacaacccatttagtgaatttggggcacaaagaaattgcctttgttgctcatcacctcgtcaatagtccagtagataaaaagaggtatataggctacgagaaagcattaaaagaagcgggcattacaccatcaaagacgtttgtttttgaagtgaacgaaagttcgtttgataacggttacaatttagggaacaagctgctgaaagatcacaaggatattcgggcggtttttgcatcctctgatacgctggcgcttggaattatgaaagcactgcaagaaaaggggaaaaaaattccgcaggactactcaatcgtagggtttgatgacataacgtttagtagctatgcatctcccagtctaacaaccattcgtcaagatgtatttaacaaaggagtcgtcgccgcgacgtcggttattcaagcaattgaacaccgtttcagcacgctgcagcatgtgaaattatcggttgaacttattattcgagattcaactgctaagcgcgggtgaaccgcagtaagttaaccgattaaccaaagtttagcctttataaaaaaaggggatataagttagcattcacaaaaaaaggggatatgaaaatgattaatgttacagtatggaatgaaaatcgtcatgaacagaaaaatccggttgtaagagaaatttaccctgaaggcattcacggtgccatcgcttcttttttagaagaaggagggtttcgtacacacaccgcaacattagacgaagtagaacacgggttgactgaagaagtattaaatcaaacggatgttttagtatggtggggtcatttagcacatgacgaagtgaaagatgacatcgttgagaaagtaaagcagcgcgtgctagacggtatggggcttattgtcttacactcaggtcacttttctaaaatttttaaaacgttaatgggcacaagctgcgacttaaaatggcgtgaagcggatgaaaaagagcgcttgtgggtagtagaaccgagccatccgattgtggaaggtattggtgaatttatcgagcttgagcgcgaagaaatgtatggagagcactttgatattccagcacctgatgaactaattttcacgagctggtttgaaggcggagaaattttcagaagcggctgcacgtacaaacgcggaaacggaaaagtattttatttcagacctggacatgaaacatatccaacataccataacaaagacattcagcgtgtcattatgaatgctattaaatgggcgaagccagcggagagaaaacgtcctgtttacggcaatgcgcaaccgcttgaatcaatcgctgttaaaaactaattaataatgcttaagcaaaggggataggaaagatggcaaaagtaaaaattggcgttattgggtgcggaagcattgcgcaacaccgtcacttaccagaatataagatgaatgaacaagtagaattagtagccgtttgcgatataaacacagaacgtgcaaacagcgtagcacagcagtacggtttaaaagcttacacaaactacgaagaacttttagcaagcggtacagtggaagcagtgagcgtatgtacgcccaattatcttcatgcgcctatttcggttgcagcgttaaacagcggagttcatgtcctgtgtgaaaagccgatggcaacatcagaagaagaagcaaaagcaatgattgaagcagcaaaaacaaacggtaaaaaactaatgatcggacataatcagcgctttgtagcttctcatcaaaaagctcgtgaacttattgaaaaaggggaaatcggtaaaatttacagtttccgtacggcttttggccacggtggtcctgaaggttggagcgtggacggaaaagacagctggttcttcaaaaaagacgaagcgtttattggggctatgggggatttaggcgttcacaaaactgatatgctccgctacatattgaatgaagaaattgtagaagtcggtgcatttgtagaaagcaatgcaaaagactttgcaaatgtagatgacaatgctgtgtgcgtattaaaaacggaaagcgggattatcgggacgcttgcggcaagctgggcttacaatggaaaagaagataactccacgatcgtttacggagagaaagggattcttcgtttggaggacgatccgacgtattcattagttgcacaatatgcaacgggtgaagtggtgaactatgaattaggaaaaatccagtcgaacgatgaaggcggacaaagtaattctcacgtcattgaacaatttgtagatgcagtggcggaagataaagaatctcctgttcctggtgaagaaggattaaaatcacttgctgttattttagcagctttaaaatcaagtcaaacgaaacaaattacgcgcgtgtaagaggtgaaaaacgtgagaattggcataatcggagcaggagggattgctgtaagcaggcatatcccggcattcaagcaactgggtgatgaatgtgtgatttgggggcttagcgatattaatagtgaaagagccacagaggtagccaatgagcataatatccctcacgtatttgttgattacaaagatatgtttaaagaagtggatgctgtatgtatttgtacaccgaataaatttcacgccgagtttgcagtagaagcgctaaaagcaggcgttcacgtcctatgtgaaaagccaatggcgatgtctaaagagcaaggtgaaaaaatgcttgctgctgctagagaatcgggtaagcagttagcgattgcgtatcattaccgattcatgaaagaagcgcaggctgcgaaaaaaatgatgacagaggtagggcgcccattagttgcacgtgtcagagcaatgcgtcgccgaaaggttcccggttggggagtatttacgaacaaagatcttcaaggaggaggcagcttaattgattacggctgccatttgcttgatttaacgctttggctgatgggaaacccaaagcatactgaagtgctgggaagtacatataatgacctgagtaagacgcctaaccaattaaatcaatggggagcatttgatcatgaaacattcagcgtagatgatcatgtaacggcctatattaaatttgaaaatggagcgtcgcttcttttagaaacttcttgggctgctaatatccaagatgatgaagagcacgtaagcatatcaggggtagagggcggtttaagtgtgtttccatttgaactatacacgtctaaaaacggtatgctcatgaacagtacgtcaccttggatagatggagaagatgattacagcctgagtcaggctaaaaatttcgttgaagcgtgtaaaggaaatgctgaattagtggtaaagccacaagaagcgcttcaagtctcagctattattgacgaaatatatcgcacaggaggaaattaaaatgaaacttggagtattcacggtcttatttgcggatctttcttttgaagagatgttagataaagtaaaagcagcaggtcttcatgctgttgaaatcggaacgggcggctatccgggaaacagccattgtccgctagatgagctgcttgaagatgaagaaaaaagagaagcatatatgaagcagataaaagaccgtggacttacaatcagcgcatttagctgccacggcaatcctatttcacctgaggcaagttttgcaaaagaatctgacgaaacgcttcgcaagaccattcaactagcatcattagtaggtgttccagtggttaactgcttctctggaacagctggagatcacgaagaggcgaagtacccaaactggcctgttactccctggcctaacgagtatggagacgtattgaattggcagtgggaaaataagcttgttccttattggaaagaaattggagaactagcggaggagcaaaatgtaaaaattggtttagaacttcacggcggatttttagttcatactccgtatacgctcctaaagcttcgcgaaaaaacaagtccagcgattggcgctaaccttgatccaagtcatttatggtggcaaggaattgatccggtaggagctattaaaattttagcaaaagaaaatgcaattcatcatttccacgcaaaggatacgtacttggatcaggataatattaacatgtacggcctgacggatatgcagccatacggagaagtccaaacgcgtgcatggacgtttagatccgtaggatgcggacatgatgtaaaagagtggtctgatatgatgagtgcacttcgcacatacggatacgattatgtagtcagcattgaacacgaagatccaatcatgtcgattgaagaaggatttaaacgcgcggttacaaacttacaaagtgtattaattgaagaaactccctcacaaatgtggtgggcgtaagcaaaaagaagcatctctaaaaagaggtgcttcttttattttcgttaataaatcaattcgccttttgttcacctgaatttcgatacaaacgggtgattggcaacccaaaaacgccaagggtaatccttcgcttcaccagaattatcaatgccaacgcgaggtccggcggaaatctctgaaggagtgaagccacgagcaatataaagaggaggactggttaaatcatgaccgtacaaatccattgaaacccctagtgcttttgttagtttcccagggccgtttgtccaatttatttcattttccatccctcgacgtctatgtttcatcaaattttttccgctaaatggctcaatagctcgaatgaggacgccttctggacaatcgatgtcgctgcttacaacattgagtaaacaatgtgtatgcattgtatgcgtataggcatgaccagaacgaccgaacattacctccgttctttttgtgcgccggttattaaagctatgagctgctcggtcgaaaggccctttataagcctcagtttctacaatgaaaccagatgcagttccttccgccgtttcgtgaacaagaagacatcctaacagcgactgagctaattcaagtgtaggctgttgataaaataaaagaggaagtggttcaatcgctaaaagagaacgcgtcatttgctgtagtccatcctttcaaaacagagtcattcacgctgttatgcgcatcttttattatgatgttttctttgttattttgcaaaggaaggcactgattaatacagtaatctttcttaccccacgttcaagtatttatcatgattcaacttactctatgaaattattttattttaaagagtggtttcgttttgcacgtatagggggaatattttactacaatacttcgcttttgctgctggtatgatatacacagttcatccatattttacatacttttagttttgaaaaatagtgatccggcttttctttattttcgttctacacatgaaagcaaaataaaaagattgaattgtagaaagctctttataaatggaaataaagaaaaaatatccttcaaagagtatttaagggattttagaacatattaaaaataaaatttatacactgtgaggaatagctatgaacatccactttgatacattaatgaacttatcaattaaacatatttttgggcctgcctctcaaacgatcaaccatctgacatatcactcaaagcaggttcacgacggatcagtattttttagtataaaaggtgaaaatgaagatggacatcaatatattaaagaagctatagctagaggagccgtagcagtctttgggacaagcattgaggagcttcgtcttttgagcactcagtattctcactgtacgtttttagcagttgacgacgttcgcaaagtaatggcatctttttctaaaatgtattttgattatacggatgaaaaaattgagacaattggcgttacaggtacaaatggtaaaacaaccgtagcagcttacgtaaggtcgcttttaacccttttaaaattgccgacaggatcgattggcacgaccggcatttggtcatcaaagaagaagttagtttataaaaaaagtacgcctacaacacctgaatcggtagacttgcataaaattttttatgatttgtatacaagaggcgacgaagcggcagtgatggaagtatcttcaattgcgattgatcagcagcgagtagaaaatatttattttgatgtagccattcacacaaatctttcagaagagcatctagagtatcataaaacgtttgaacactataaaaagtgcaagatgaaattatttcagcaggcaaaacatgccgttattaatatagatgatcaggacatgggtaaagacttaagcaggctatttgaaggaactaaagtcacgtatagcttattaaataatgcggaggccactctgcaagcaaaaaatattactgtcaaagaagggggctctttctttgatttactgtataaaggacagtcatacaaagtagcagtgcctgtatatggcgattacaacattgctaacgtgctagcggccattggtacagctcttcactttgaataccacattgaggatattattagcgtgcttcctcaattggaaagtccagaagggcgctttcaagtgatagaaggtcctaataaccaaaaagtgattttagactatgcccatacgcctgttgcccttacgcgtttagtagaagaagtaaaaaagatggagtataaccagctaattgtcatgattgcagggattggcattcgagattttaataaaatgcctaaaatggcgcgtgtcattgaaggaaaagctgatgaaattgtcgtaactgttgatcatccaggtcaccatgatccgaacgtaattgtagatcaagtaatgacgggtttttcaaatccaagcgcaagtaatattcaccgtgcccctactcgaacagaaggagtattaaagtcgctttctttaggaaagccgaatgatattattttactcacaagcggctgtattaacggcgctcagcttgtaaaaggcaacgaaattccgcattcagatgaagaaattattgcctcttattatgcatcgttaagcaatatttcctaatactcttcttcatttatcgaacgaacgtggagaaattgaaacagcatatgaaagaaggtctcttactatttttagagaccttctttttgcatcaaaactataggctattttctcgctgtgtttttggttcttcaattttcacatcatgttctttagccagctttttaatagctgcattgtaatcgcgtatgccttttcgtgcctcatcaagcatagcgtttgcctcagcaataaggttgcggtcctgcttttctaaagcgctgacaattttaatgaaagcattatactgggtattggcagcctttatatagccttcatgaacctttcgaagatcgtcggtttctacatcgatgttttctagttcgtcaacaaatttacgataggtaggaatgacttcactcgtcatcgtatcgtacattaccgcgtcacttgtgtagttagcgcctgtaacagaatcgtatgagtcaatcgcttctttttcaagctgagcggctttttttaaatcttggttgttatagtcgattaaatcatcttgaacaggatcactaaagcaggcggataataaaaacaaaagagggacaagacaaaataaaaccttcttcaacgaatttcacctccgtttaacaatgtatgaaatatctgcttggcaaagtcggttttaataactggagaaaaagaagggagtgtataaaaggatttttaaaggtcggcagtgaatttattcataagtcggtttgtagttgaccaccccttagtagcaggaaggaagagaaaatgattaaaataaaaagagaccacttaacgaacaatgaagttattgaactagtaagttctcaccttcaaggaatgaacttacattcaccccctgaaagtattcatgctctaaatattgaaagcttaaaacaccgtgatactacgttttggagcgtgtgggaagacagccagctagcaggatgcggggctataaaagagttagatgagcaccacggagaaattaaatcgatgcgaacagccgcggctcatttgcgaaaaggaattgctaggaagctgctgcaatacataataaatgaagcacaaaaacgagggtaccgacgcttaagcttagaaacaggatccgcgtctgcttttgaaccggctagaaagctgtacgccagttttggattttacgagtgcgaaccgttttctacttacaaagaagatccatacagtgtatttatgacaaagaaattgaatgattaaaagaggatgggacaaaagtattttagttgaaggaacatccgaacgaggaatcaagattcttgatgaagaatccaactcgttcggatttgtcatggtgatggtgaacgtaggtttcgtatatgtagttgcttcaagcggttgatttagttatgtctccacctatttattttttgttttgtcataattcatataaaaaggtataaactaggttttttcactagacaaaaaggtttttcctatgtagtataggtgtcagataatacaaaacgaatgttcagtataaataataaatgtgcagggcggtggaaatagcttgaataaaaaaaagcttcaaagtgaacaaaccaaaagaaaagtggcagatgccgctaaagcattgttttctcaaaaaggttataaagctacatctattgaggaaattgtagaagctacgggaagcagtaaagggaatatttattatcactttaaaagtaaagaagggctttttctctatttaatagacgaatgggatctcgagtgggaacgaaactggaaagaaagagagtctctttacaaaacaacaagagataagctttttggaattgcggagcaaatcattttagatgatttgaatcatcctcttacgaaagccgccgatgagttttttaacaacgaggaaaagggcagcgacatcgaagagcgaattgatgagatggtgaaacgacacgtggagtttaaccgggaacttttgcaaaaaggcattgatgaaggagagttttctcctaaaaatgcagaacagcttgcagtgattttagaagggctgtttgttggaatgagccgcatgtctcgaaaaatgaacacggaaaatgccctgcagctttatcattcagcaatcgatgtatttttaaacggaattatagcaaggtcttcttaaataatcggggatgcttattgcggtaatgagtaatccctcattattttgtatttttatagaccgaacgttcagtatttttgtaatcaggaggtttatatgtcattattgttaagaaatcgagcggcgattttgctgctcatgctaaacatttttattatttttacaggaatcggtctcgttattccaattatgccaacatatatgacggagcttcatatcaacggcagcgtgatggggcttttagtagcggtgttttcactaactcaatttctgttttcacctttagcgggccggttatcagattcgttagggagaaagaaaattattgtagcgggaatgattgtttttgctttgtctgaatggttctttggttcagtgagtacacctcttttattatttgtatcgagaatgttaggcggggtcggggccgcgcttattatgcctgctgttatggcctatacagcggacgtcacgtctgctaaagaacgcgctaaaggaatgggctatgtgacggcggcgattacaacaggatttattattgggcccggtattggaggctttttagctgaatacggcatgcgtgtaccattttatatggccgcagtagcaggaggcttggctgcagtgattacgctttttgttttgccagagtctcgtcctgtacaaaatcatgctgtttcaaacaatgagaatccaaaagaagatcggctgctactgcagcttatgaattcctataaagaaccttattttctaagtttaattattgtttttgtgacatcgtttggattatccaattatgaaacgattttttcactatttgttgatcataaatttagctttacgccaaaagatattgcgtttgttattacgtttggctctattgcgggggctgtagtgcaggttacgatttttggctggattttaaataagtttggtgaaaaaagagtgatttcgttttgcttgatgatgacgggactttttattttacttacgctgtttgtgcacacgtactggcttattattgttgtgacattcatcgtctttttagcaacagatattttacgtccggcaatcagcacgcaaatgtcgatgatggcacaagacgaccaagggtatgtagccggactaaattctgcttatacaagtcttgggaatattattggaccagttgtagcaggctttctctttgatataaacattaattatccgtacgtatcagctgcacttgtactgctgctttgttttcttttatctttaagaacagggaaggacagaaaaacagctgtgagaaatcaagcggttcaagagaaataaccataaggaaaaaatgatagaattcctagggaattgaagacttcgagtagcttactggaggtcttttgattattcttttagtaaaggtgtaaggtttacaatggtactcagcctatagagaagctttattttatcggcaaaatagtgaaatggttgcaaataaaaaaggttaatagtaaactttatacgtaacaagaatagtatgggagcttgtgcggggcaggctgagagtacagggacgcctgttgaccatttgaacctgttggataatgccagcgcagggaatgtgagtacataccaaagcactttgcgcatgcaaggtgcttttttgtctttttttgcagtgttaaaactaaatgaaaagagtgagagaatatggatattagtaaaatttcagctcaattagaaaaagtaagagatacaagtccgcttgttcataatattacgaatgttgtggtaaccaattttacagcaaatggcctgcttgcactaggagcttcacctgttatggcttatgcgaaggaagaagtggctgacatggcacgaatcgccggagcgcttgtcttaaatatgggtacactgacggctcaagaagtagaagcgatgagaatagcaggaaaatctgcaaatgaaaatggcgtgccggttattttcgatcctgtaggagccggagcgacaccgtttcgtacagaagtagcacgtcagcttgtagaagaattaaatattgcagttattcgtggtaacgctgctgaagttgcgaatgtagtaggcgagtcatggctcattaaaggcgttgattcattagaagggcaaggagacgtcattgaacttgctgagaaagcagcgaacaaattagatacagtgattgttatcacgggtaaacaagatgtaatcacagatggaaacacaacgtatacagtagacaacggtcacccgttatttacgaaagtgacggggactgggtgtctgctgacatcaattataggagctttcgctgctgtagaaaaagaatatgtcgaggcaagcgttgcggctttaagtttttacggagtggcaggtcaaatcgccgcagcgaaaaaaggtgaagaaggaccgggaagctttcaaattgagctgttaaatcagcttcatcttttatcagggcaggatattgaatcatatgcaagagtacatcaacgttaaaaggagccggaaaatgacaaacgaagaaatcaaaaagctgctgcaagtttattttataatgggcagcaataactgtacaaaagatccgaaagaagtgttgaaagaagcaattgaaggcggagttaccgtgtttcaatttcgtgaaaaaggcgagggtgccctaacaggagaagcgaagtatcagcttgcgaaggaacttcagcaaatttgtcagcagcacagcgttccttttgttgtgaatgatgatcttgacttagccatccgcttacaagcagatggcgttcatattggacaggaagatgaaaaagctcatattgttcgagagaaaataggaaaaggaattgtaggcgtctctgttcataatgtacaagagctgcagcaagcgataaaagacggggcagattatgtaggaatgggacctgtttttcctacttctacaaaaaaagacgcaaaagcagtgcaaggtacaaagttaattgaagaagtgcgaaaccagaatattgactttccaattgtaggaatcggtggcatcacgcctgaaaatgccaaacaagtagtagaggcaggtgcagatggcgtttctattattaccgcgattagcttagcagcgtctccaaaagaaaaagcagctcaattgaaagaagcggtaggaaaataaaaaagcgcacagtgtgcgcttttttattatagctgaacagtttggggagtttcttcgccttcattcataaagcgaatttcgttcggcgtaatttcaagaacaacatactcagggtcatttggaccgtcaaaccattctttcatgtgatcgttccatatacgcccttttaattgatcaccagtacgaagaacagctgtaccagataattctaagtattgatcgccatatccttcgccgctgtagcccaatagtacgtgcacgttcggattggcttcgatttcttctgccttatgtgtattgatatttgttggtgtgtaaagagcgataccatcttcatcgctaaagaatgtcatatagcgagagtggggtttgttgtttacaactgtggctaatgttcctacacgatttccttctaatacttcgtttacttttttagcaattttttgttcattcattttatccatctcctttattactttttatgttcctcaaacgaagataaataaaacatacatgtctaaaaaaatataagttaacaataaaataattatgtaaactagtaaaatgaaaaataaaaaaagctagctacagctaactaaaaaataagcccgcactgccgtaaccctaagtgtcttaaatacccagatctactaggtgggtgccctcatagccgggtttagcgtcccaagaagggcgtgctatctgcagctaaattttgagctcccttttaacactcaaaggtttaagacaacatgagtatacgcacagcgcaggtatgtataacaaatgtaaataagatgccgatatataaatgttttctaattaatcaactttcatcgtacaagaaatgattataacggaataatgaatggaacgcaagacttttatttaaagtttttcttctctaacatcttggcggggaagcagtaacaaaataagaaaagggcccgcaactggaatgaaacataaaagaaggtaaggccgggatgctatcctttcttttgtcataacggagtaagaaagccacgttaaaacaaaaaaatcagcggtcatcacgctaacaagctgtgactgcataaaagcatctccataagcttttattgaacctacggatagtccgtatacgtaacctgcaatcgtgagcactaagcatagtccaatccatagatgagaagaaatgatagcaatgaaacgtgaaggaatacgcgaacgtgttcgaactttttgtcctttccaatgataatagaacaaaagagaaaaagctccaagcgcaaatgatagaagagaaaatggccatccaggcagttgtatgtatcttttttacagattattaccataaacaatactgggaaaagtcctaaaaaagagaataccataaccacgagcggatctaccagttgaaaattttcggtgataagatttttaaacagcaaatcattaccggcgcttgctcccggagctagcagccaggcgtatagtacaagcatagcccatacaatgatatacatattctcaactccttttaattgttttagtgtacaaaaaccatttcagtatatttccccgtcttgtgacgaagggaaacgcttgaaactcttctttaattaggtgtaatattacactaaagaaatgtacgtgtatagaaagaaagggctgtgaaaatgaataaacaagaagtaattaaatcagtatcggataaaatacgattaattcgtttagaaagaaactattcacaagacagaatggctgaagtcattggtatttccaaaaaaacattggttcaaattgaaaaagggcgcacggaagcagggtggacgaccactgttgcagtatgcggtttgtttggtgacagtgaaatccttcaatcggttttgggagacgttcctttagaagtagtagaaatcattgctcataacggcgtatcttctccaaaagataaaacgctcggaggaagagtatggtggaaagaaattcaaaaagaaggctcttttcgtctgcagcaaaatatgattagtcagcactatcgcattttagatgaccaagactatcgatggtttagttcatttgataaaagcgaagcggtgaaaaggtttgaacaattaacgaatgaataaaaaagaggccgagacgtaacgacatcactgcatatatgaaacctacgttcactctatccataaaaaaaatccgaacgaatttgattctctatcaagagtcttgattcatcgttcggatttttcttccactgctatacttttgtctcagcttctactgattcattaaggtacctgatgagggacgactgaaccaattccatagttctacatctccaagtgacgcatatgtgatcgacggatcattttttaatttcagaagcttttttgtaggccctgtaatcacaacgccgtacacgccgacgccatgtttttttacataagaatatcgctgctttagcaacagatcagaatggtctagctgacgaactttttggaccgtttcttcattatcggctaatagtttcatcatatttaaaacgttcgacttgctagtagagtgggtttgatttcctttgtgatcgtaaggtaagtctaaaaactctggaaagccaaaggttgatgttaagtcaattaatggctcatcttttgtgcttgttttttgttcgtgccctgtattaagcgcgtaccaagaggtagaaaaatcacggctgtcgatgacgttcattttttgctgaacttcttttagcgaatacgtatcatcaaaagaaatagccacttcgctcaccgttccttttggtagattttctaacgctttccatgtttcgtttgtccattgcttatactcttttgcatgtagctttagttttttgggatcaggatagacaaaagaaaggttaaggtcgtatttgccgccggagaattctttttctacaccgcttgttttatcaaacagctgatgaaatgtaaacgtcccaatggcctgctcttcacgtccaatttgcttataagcttccatttgcgactgcatgcggaaaaaggactgtgtatcagaagtggtttcacgtatatgaacgttcggaaaagcagattcgatagccgcttgattcacgctgtttatgtattcggtttttgattgatgataatatacaatagataaaaagctgccgattatccatagcagaacgacagagccaatgacagttgtcacatttgaaaggcgctgcttccatttggcgatataaatggactttttaacttttttattatccaacatcgtatcgtcacttagtgaagtagctgatgaagttggcggtaacggttcatcttcggttagcaagtgctccaaatgagctgagcatgcttcgcaattttccgtatgttcttcaagtgcttctgcttctttgtctgtcaaagtgccgtttttatatttttcccattgatgcttcatatcttgacagctcatccgtcctcttcctttctttttttcaattgttgacgaccacgatacaagtccattttcacttttgacagagtatagccagtcatttctgcaatctcttcatatgtgaagccgtgataatctcgtaacagtacaatattctgcttagctggaggcaaagcagatacatcagaaagccagccgtcgatttcactttgaatcatcacttgttcttcagcacttggctgaggagtaaagtgccattcttctatttcgacagtagggcgttttttttcttttcgataccagtcaataaaggcgtgataagcaattttgaacagccaaggcttcacttcctcgcctttatatgtttctaagtgtaaaagtgcccggtaaaaggtctcctgcattaaatcttccgctgattcttttctgcgagtaagagagagaagatagcgcagcaaatcatgcatgtgctgtttataaatgtgttcaaagttatgctgttgtgccattttctccccctttcatttaatcaacgcaatttgtggataaaagtttcggtttttttatcaaaaatcgtatgtaatagataaaagatgcttaaaatacgatatatagcttatcatattaaaaagaaaaccatatgaaattcgacataattccgtgtgatttgtcatttttttaaaaaactaaagggtaattggtgttcgaaggaaacagaaaatgttatgatagaacaaggatgtgctcttacaaaaaacagctacatacataataaaaaatacagcgtttgtttgcaaaataaaaatggacaaacacatggtgtttaaccatggatgtttgtgggaaaataaactaagtattttcaacaaaaagtaaattaaattgtgttttcacttataaaaaacacggtaaattggaaaaggtggggtcatgatggacgtagaaaatacacaaggtacagaagaacaagcacctaaagtcaaagcagctaaagttggcgatacaattcagccaaaaaaaggcgactataaaggatttaaaggaattgttatggtagtgcgagacaattcggttatcgtagattttggaaaagatgctgaaacgggcgaatccatgaaaacagtcgttaatcataaaaactataaaatcgtaaaaaagtaggtgaataacctacttttttttactgaatatatgtttaaagactgcggtttttctatcggaaaccttagagaaaagcgtaggtaaggcaattctttgagaagaagaatgttttttagtaaactatagaaagtatgcagaaagaaaggatttttgttatgtcaattcaactatcacaattatcattaccacaagaggttctttcgcttttagcgaatcgtaaatatggaaacttgtccgatgctgatcagctattaattggaaaaggcggctatacagcagaagaagcagatattttagaagatgccattattgccttgtcactagggaaaaacgtacttttaaaaggaccaacaggttcaggtaaaacaaagcttgctgaaacgctgtcgcatttattttctcagccgatgcatagcgttaactgctcggttgacttagatgcagaagcgctgcttggttttaaaacaattgcggaacaagaagggaaaacaggtattgagtttgtggaaggacctgttattcaggcaatgaaaaaaggccatttactatatattgatgaaattaacatggctaaacctgaaacacttcctattttaaacggggttcttgattaccgaaaaatgattacgaacccattcactggagatgtagtacgcggtcagcaaacgttcggcgtagtagcggctattaatgaggggtatgttggtactgttccattaaacgaagcgttaaaaaatcgttttgttgttattgaagtgccgtatattcaaggaggcagcttaaagcaagttctgatgtctcagtctcagttaaaagacgaaaaattaattgataaatttgtcacgctctctgcggatttaattactcaagttcaaagcggccatgtatcagaagaagctgcgtctattcgtgcgcttatcgatacgtgtgatttagctctttatatgccgcctcttcgcgcgattagacgcggtattattgaaaagctagaagatgaaagggaaaaagccgccattcaaaatattgctgaaacattatttgagtaaggagtggcgctatgcgatttattaaatttaacgacaaaaatgtagattcctttctctatatggagctggcagatttaacgaaaacattaacaaaaaatgatgaaattgaagtagagtatcgcgtttcttcttattatgatcctgtacacggcattatttatctcagtcacttttgggataaccgtccagaagaagacaaagtgtacggcttaaaaagtgatgtatttttaagaagtattggaagctataagcattcaaacttcaaagaaattaatgcatatttaaagaaaataaataaaacctcggtacctggcttagctaagcagctgtttatgctgtttgaagatattcgtttagaagaagtatgcaaacgcgaacgtcctggaacgaaaaaagccttcgccgtcagaagacagctctacagaaaatattttgctacacaaatgagcgcaaatttaacaaaaagcgtgtatacggatgcactttttaacggcatctacttgctattgacggccgaaaatccatttgaagaaattccttcaatgagtgaatcgattaatttagcgatgccttttattcgcagacagctaacaaatgtatatgaagctaaaacaacaaaagatgtatcgcgcatctgtcttgaacttttagatgtttttgatgatattattgaaaaagatatgcttaatacttatttcttcttggctgaactccagtatgatcagttagaagaagggttaacatttgaagatttaaagcgcaaagattcattagtgaacgatgatattttagaacatgaaaaagacggagatgaagacattcacgaagagaaaatggaaatgtggcatcgagagacaagcgaagcgacgcaaagttttctacagtttgatatggatcaaggctcaaaaacagacatgctaggcgatggtgttcgtgaaggcgacgatggagatcaagcaatgggcatggtgcaagggtcttctcaaaaaacatcgcggaacgattattctcaaatcgaagccatggagcaaacgcatccggaaaaagatggggaagcggattatgagtatgggaaagaaaataagcatgcctatgctgtttttatagattctaaacttccgaacgacgatcacgttgttcagtatgatgagaataaaaaaattattgcatcgtatcaaaaaaaattaaagcaaatgattgaaaaaacgcttgaacataaaaaaacgcttcctagaagcgagctgcactttggccgattaaataaaaagcttctaaaactatggacagacgacaatcctcgtttgttttataaaaaagatgaagattctgcgcaaattgatgctgtcttttctcttttagttgattgttccgcatcaatgtacgacaaaatggatgaaacgaagcttgggattacgctatttcatgaagcgttaaagtctgttatggtgcctcatcaaattgtaggattttgggaagatacaaatgatgccaccgaaacgagccagcctaactacctgcagacagttatggactttcaagcatcgttaaagcgtaaaagcggtcctgaaattatgcagcttgagcctgaagaagacaaccgtgatggatttgccattcgccatatgacacgccgcttgcttcagcgttctgaacagcagaagtttttacttgtgttttcagacggtgaaccagccgctatgggatatgaacaaaatggtattgtagatacgcacgaagcggtattagaagcacgcaagcacggaattgaagtcatcaacgtctttttatccaacggggaaattgatgaaggacaaaagaaaaccattcaaaatatgtacgggaaatatagtattctagtaccaaacatcgaagaacttcccgatgtgctatttcctttactcaagaaattacttcataaaagcatttaaaaaagtcgaagcatattgcttcgactttttttgctattgaccgttaaagaagagcgaggtaagttaaatatatatgaaaaagagagaaggaatggcaagtggaaggagttcaaacgtcatctagaagagcatgggggctgctgcttgtaatcattggtgccacaatgtggggagtatctggcacggtggctcaatatttatttcagcataaaagttttaacgcagagtggctggtcgtcgttcgtatgttagtatccggattgctgcttttggcaatagcctctaagcagcgcaatatttttgcaatttggaaaacaaaagaagagaggacttcgctgcttttgtttggtgtaatcggtatgctcggcgtgcagtatacgtattttgcagctattgaagcaggaaacgctgctacagctacagtgcttcaatatacgtcgccaatatttattattggctatttagccctgcaagcaagaaagtggccggtgaaagtagaaatgatttctgttgtgctcgtcataacagggaccttttttcttgcaacaagcgggaattttaacgagctgtctattacagggtgggcgttgttttggggaattggggcagctgtgacgtctgctttttatacgcttcagcctaagcgtcttcttgcgaaatggagctcaattgaagtagtaggctggggaatggtgataggcggcgcaagtttttcatttattcacccgccgtggcatatagcaggtgagtggtcgctattgtcgctgtgtgcggtgttatttgtaatcatcttcggaacgctcattgcattttattgctatttggaaagcttgaagcatattagcgcttctgaagccattgttcttgcgtcagcggaacctttatcagcagcggcgctctctgttctatggcttcatgtgacctttggatggacggagtggttaggtacgattcttattatcgctacggtatttttactttctcagcgaaagccagaggtgacatcataagtaaaaaggactttcaaatgaaagtccttcttgtttttatagaggttttagcgtaaacgtgtttgtatacgagcggttagcatatagtgtgtaatcaggatgtgttttagcttgccagctatcgtctccgccaacgcccatttgcttgtagttaacccgcacggttactgaatcgcttgccggcaatttgtaaaaatgatcgtaagcctccagttcaaaaggtgagtaaggtaaagcgttcagctcgactgttggcaaaccttttatcaaaaagccgcgcccttgatcgtttgtaatagtggcccatcgaacgtccgttttatttccgcattcttgagggcgtaaatacggtgtaacttgctcttttacactgcctttatgaagggccagcttagcgccagttttacggtcccaataattttcatgaggtcctcttccgtaccacgttaaagaatcaaaagccgcattcatcgtaaacagcatgccgatttcaggaatttcaggcattgtctcagaaggtgctaaagattgttcaatcttcattttaccatcgttatatagcgtatacgttacatagcaagaagcaagagagttatctaaagctagttcaaccgaaatgataacaaagtcaacttgcggctgaacgattactttttttacgtgctgttctaaacttgcttgacgccacgtttgacatctttcatgcagtttatttccgaggtcattatcggttactgcacgccagaaattcggacggaaacccgacgcaagcagctcggtgcgctcatagttgtaagaaataaactggccttttcgcttatcaaaaatagccgtgaagttagttcctgtaaccgtaagcgtttgttcattttggttaacggttaaagcaggatgagcagcttttactgaaggcatagcggctttggcaggcagcacaaactgttcgtacgccacttcatatccagctgaagcccaggctgtatctttggacaatctgagagaaagagttaaaacaaattcgtcagcttcattttcttgctcataaagaggataagaaagcgtcagttcgtctgtaccatcaggagctacatttaaaagtgacgcatgcttttcaactagttcaccatttttttcaacagtccaaacaaaatcataggcgttcaagtttgtaaacaagtgtttgttttgaacggcaaactttccttttgcagcgtcgactgctgtccactttacgggctgatagcatttttttacttctgcaattttggggctagcggtcccatcagcaaagattaaaccgtttccgcagaagttaccatcgttaggagtatcaccaaaatctcccccgtaagctaagtaagaagtaccgtcttctgctgttgcttgaagagcttgatctttccagtcccatataaaaccgccttgcaagatcggatattgatcgaacagctcccagtatttgtacagatttccgcatgaattacccattgcatgactgtattcacataagatgtaaggttttttcggattcattaatgcatagcgctctacatctgctggcttaacgtacatcgtgctttctatatctgaagcatcatagtcgcgatgatggaagattccttcataatgaacaagtctcgtggaatctttttctttaaaaaaggtatacatatgctgaaagttttctccgccaaatgattcgtttccaagcgaccaaataatgatagaagggtggtttttgtcacgttcgtacatggaacgacagcgatctaatacgttttctttccattctggcttgcttcctggaacggctttttgctcaccttcttgtaaataagtccacgttccgtgcgtttctaaattggtttcatcaataacgtagagtccgtattcattacatagttcataccatactgaatcgttaggataatgggatgtacgcaccgcgttaatattatgctgcttcatcagcaaaatatcgtgaatcatgtcttcgcgcgtgatgcctgcccggccctttactgaatcaaattcgtggcgattcactcctcgaagtacaatacgcttgccgttgattgtcatgaggccattttttagttcaaacgtacggaagccaactttacagctttctgtttcaataatagaaccagcagcattctttaagctgagtacaagggtatacaaattaggactttctgcgctccattttgcagggcttttaatgtgtgtacgcaaggagactgtacgttgatcgctcacacttaaatttgtttgcagcggagcttgtagtacttcttggccattcgcgtcatacagcatgacttcaaatgttagatcttgagtatcgtgctcaaagtaatttaaaatatcagctgaaacgctaagttcaccatcttcgtagttgttatcaagcgacgaacgaacgctaaagtcatagatgtgaacctgtggagtagagtaaagatacacatctcggaagatgccgctcattcgccaaaaatcttggtcttcaagccagcttgcatcactccagcgatatacttctactgctatcgtattttcaccttcttgaaggtaagaagttatatcaaattcagctggagtaaagctgtcttcgctgtatccaacaaactcaccgttaatccatacgtaaaaagcagattcgacgccttggaagctgatgtacacgggctgatctttccattctgatttaggtgtaaaagtacggacgtactgaccgacagggttatatttagtcggtgcaaaaggaggttcgaggttttcgttttcaacccaagggtatgtcacgtttgtatattgaggataatcatatccttgcagctgccagtgtgaaggaactgaaatagagtcccatttcttatatgaaaattcaggagcgaaaaagtttttgacgcggccatctgcattttcagcaaaatgaaagtaccagcttccatttaagctttggtagtaaacagaagattttctatcattttttaaggcctcttcgaccgtttgataaggcattagtaaagcgtgtgctttcgaacggttcaattgaaaaatttcagggttgttattccattcaggatatccgtttgcaggtgctgtataatgaaatttcttgccggtttttaacatgttgatccctcatttctaaattactaggttattagtttatatgaaaatgataacgttttctgaaaaccttatcaatctaattattttcatgataatataactatattcacatagaaagggggaagtaatatggaccgtatgtactttccggctctttcagatgaagatatgaaactgccattttatgttacaagcgctggaagctggagacatcaaacgcatattaaccgtcagggagagtttcctgattatcaatggattcaatgtataaaaggaagaggcgagcttcatgtaaatgacgaggtttatattataaaagaaaatgaagggatgtttctgacgccgcacgttccgcacgaatactatcccgttacgagcgaatggcaagtatgctgggtttcttttaacggaagtgtgatggatgatattatgctttctcttcaatttattaattcgggaaaaatcgtccttacaaatgctgaaagtctttacaggatgcttcaagaactaatgaatcggttagaagaaaatcatacctttagcaccatgcagtgctctgaactactatacagcgtcattttaaaacttcgccaagacagcgtatatatagaaagcaaaagtcgcctgcagcaaattactcagctaaacccagtccttcgttatatcgaggaatattatcatcagccgttaacgctagaagtactggcgcagcagctcagcgtaacggagcagtatacgtgtttgctttttcaacaatctcttggcatccggccatttgaatacgtaacgcgcgtgcggattcaaaaagcaaagaaactgctgcttaaaaacaaccaaatctctgtacaagatgtagcaagacaagtagggtatgaacatccaagctactttatcaagcgtttcaaagaacaggaaaacgttacgccaactatttttcgaaaaatgtatttttcataagctacatatatcgggttttatctaggtcataagacacgatgtatatgctagttatttcgtatgagttttaaaaaagaaattaaatgtagttttaagtgaaaacggggaggaaaagtagagagaagaaacaaaaaggagggataaaggtgtttgggttaaatgatcttccaaaatttgtgtggtcattctgtcttgtattgccacttgtatcatttgttcatcagctggggcattccgtcatggcaattattttcggagggaaggtcgattttactattgggcgggggaaaacgattcttaaaatggggaagtttaaaattaagtcagtctattttttagactcgttttgtaaatatgaaaatcttaagaatgacagtcgcatttctcatgcagtggtgtatgctggtggtgtactgtttaatttgcttactatttttataataaatggattaattatggctaatattctgcctgaagatatattttgctatcaatttgtttatttttcagtctattatgttattttctcactgctgccaattcaatatacagagacaactgcaagtgatggacgtgctatatataacgtattacggtacgggaaaacgtgtgatccagattaaagggctgtgtgtagcagccttttttggtgcgttttttcccggtcatttaaataaaaaaaggaaaactttacgaaaagaaaatagtagcggataataaagatagtagatgttggaatgtaagaaaggagaggattcatacgattattgagacagaacgaatgacgctgcgagccatggccgaaagcgatgcaggaaatttactgaaaatctttgaggatgctgaagcaatgaagtattattcttctactaaaagcgaacaagacacacgtcgctggattcaatggatgaagcagcattatcaaacgtacggcattagcatgtggatcgctgaggataagcagaaaggagagtttcttgggcagtgtggcatggttcttcaaaaagtagacggaaaggtagatccagaacttggttatttatttttacgcagccgctggggcaaaggctatgcgagtgaagcagcaaaagcttgcttagattatggacttcatacgctgaaatttcagaagattatatcattaatagatcctgacaatttcccatcgattaaactggctgaaagaattggcatgaaaaaagaaaagcaagttaacaaatgggataaatcgttattcttttatagtatatataatgaaaaatgagagtataggagtgttagcatgatcaaaattaagaacgtttcggtaaaacgagcagaaaaagaaattttaaaaaacgtgtcgtggttagtggaaaaaggggaacattggtgtttgcttgggttaaatggttccggaaaaacgacgcttttaaatataatcaacggatatatctggcctacaaaaggtcaagtagaagttctttcaaggaaatttggagaaacaaatctgtctgagctcagaaaagaaattggatgggtaagctcttcgcttcaacagcggtttcgagatgacgatacggttgtagaaatgattttaagcggaaaatttgcatctattggtttatatgaacaagtggagcaaaaagatatgaaccaagccatagaattaatgcagctgctaaattgcgcagatttacaaaatcaggcgtacggaacactttctcaaggagagcgccagcgagtgctaattgcccgagctcttatggcttcaccaaagcttttaatacttgatgagccatgtacaggtctagatataatggcccgcgaacagcttcttcagctaatcgcaaaaatggcagagcagccaaaagcgcctacgcttatttatgttactcaccatgtagaagaaattttgccttgctttacccatacgctttgtatgcgccaaggagaagtgttttcttctgggaaaacgaaagaccagctcactgagccgcatctttctaaattttttaatcactccgtagagattcagcagcagaaggaacgcacttggctgtcattaaaagaaccggtaccggtaaaaagctgatctaacgtcgagaaaccttcttgcataccatgggaaaaagggcgctgcttgcaatggaaacaagctcattgtgaagataatgtttacatgctacataaatagtggtgccgcaaataatatcaattagtaaaaaagcagcaatgtcatgtttatcaatggttacaaatacaaaagaagaggaatcataagctgtcatcgttggctcctttggtcatatcgttatgttactttattcacaaaaggcttgggctatacgaacttttaaagaagtacgatgatgacagctggttctctcctctaaagctgataatactcttgttcgagtatactcatgataagatctgtctgaaatgcttcttcaataaaagcaccttcacgctctattccttcttttacaaaaccgcatttttcataacaagcaatggctctatggttgtattcgagcactcgtaaatcgactctgtgcaagtgaaggtgttcaaatgcgtacgcaagtaccaattttgtaacttcagtgcctagcccttgactccaaacggaagaatcaaataaaccaattgcataccgtgcgcgccggtcgtactcgttaacggtcagccgggcctctccaacaaaacgctgctgatattcaatgcaccaattcagcttttgagactttatgtactcgacgtgccgcttggcatcttgtaatgtaagaggttttaagtttcgggtatcgcctccgtacatgcgaataagttcttttgtttgtttgcatgctagatagtcatttacatcgctgtcctttggttttcttagtatcacgttttttccttttaaaagtggtgaaacattattcatttgatgcatcctttcttttctaacatttaaaaaggtattccacttgtttcttaaaaaacctgcttttacgtataaaaagaaattgagacacaactacgtccatcgaatctcaagacaaacaaatgggatcaatgtgctagtgtggagtgcttgttacaccgcggttgatttccgtgcaagacttggcttcccattaactgctctacatatatggagcaagcctacgttcatcctacaaataaaaaaatccgaacgagttggattctcaagcaagaatctcaattcatcgttcgaatcttccttcagctaaactccttttgtcccagcctttttacgaagaatgtttttttgcgtagtgggcaagtgcaagaagaggaaaaatatcattgtagctgtggtactgaatataaaattgtccaggaagaccaattcccgtggggtaatgagtttgctgctctgtaagatttggatttagtaaaaatttaattcctttttcaacggattgatcttttaacggacatattgtcattaaagcatcgagagcccaagccgtttgagagggggtgctaaacgatagtggcacatatttttttaaagaagcgctatagcatgattctccgaatccaccgtcttcttgttgaatgcttttgagccagttgatagctttgatgatacgcggatcagaagcagaaacccctacagcacggagtcctgtaatagcggcccacgttccgtaaatatagcaaactccccaccggccgtaccagctcccgttatccaattgatgatcaaacagccattttactgcagctttaatcgaagggtgggatttattcataccagcaaagtttccgagacactcaagcactcgaccggttaaatcggcagtagccggatccgtcgctgcatcttttgcattttcaagcggcagataagtaaataaaatagagtcggtatttttttcaaatgcagcaaaacccccatctttgttttgcatggacagcagccagttaatccctctttgccaagactccaaataatctgtatcggtttgcgctcttctagaaagagctctgatagcagcagacgtatcgtctaagtcagggttatttgtattaatatcggaaaacccccagcctccaggtgctgtatttgggttatgaaactgccaatctccaagctttgtatgctgtcttttctttaagtagcgagttgtgcctttaatcatgggatcttgctgcggtacacctgcttcctgtagagcgtaagagagcagcgcggtatcccaaacggttgacgtggagttttctacgtgcacgtggccgctgcatgtactaagtagtgaacaaatcccgtcaattgctttttggatcacaaatgaatcttttttatagccaagagccaaaagaccgtaaatcataaaaaaagtagaggtggcgtagctgtagagtgttccatctttttcaattctttctagcatgtaacgctcggctgcttgataaccaagtttgtggatgtaagaaggtaaagaagccagctgttttaaatggtcgactaaaaaaattgaagcgcgtgattcttgagtagtttcctccgattcctgtttctgttctcttacatctaaatgagaaagagaaggtgtatgcctagaagtaagtgaaaattttttgtttcctgctaccatcatcggaacgaagtgaattctggcataagtgcttaattcataaaagttaagcggtacataggtaggcacgagcaaaagagaaagcgggaggtaaaatagctttggccactcgtatagaccgttaacagaaagcatccatcttgtgagaaaatgagcgcgcgaaatgcctcctgaatctataatatatctttctgcttttcgcaaaatccggtcgtttttttggtaatatcctgaatataaaagagctgtataagcttgaatagtggcagataagttatgttcttcatcatcaaacaacgtccaaagaccatcttcattttgaagggaaacgatccgttcggttaattgtttaatcaacacttctttatctaaatcaaaggtgcgaagaagcataattaaaaacgcatcaggcataacgcctgtttcaaaacagtagcgaaatgacccgtcatttttttgtgttgggcgcagataggcgattcttcgctgaatctctagctgaacttcctttagcaatatgatcacctcttatgataatgcttttcaatctttcgacctgtttctttataactgtattcaaaggaagagagttctatgagaggagaaagttgcaaagaatagagcgcttgctgcacaataaaggtactggaaaattggagtgatagaagtgaaagaaatacaggtagaagttattcaagggcggggctcttaccgagagcttggtgaaatgcaagggaaattacataaagggacaaagctgtttgaaaatcatcaaaaaagaagaaaacgttcattacgaagctatcaaacgatagtaaaagaagctcgtcattattacgacttatttgctcggggactgtgggatgagctagtgggcttagcagaaggcttagattggcctcttgaagacgttattcatgagtacagcgggtatcagcaagagtggaaaaaaacgggatgttcggctcttatgcagcacggcgtgtatgtacgaaactatgattatcatcctaaaacgtacgaaggtcgatttttgctttttcagccaaatgaaggatatgcaagcgtcggatttggaacaagaatgattgggcgaatggatggaatgaatgaaaaaggactggcaattggctatcattttgttaatcgccgccgtcaaacaaacggatttatttgctgtacgctcgctcggtttattttagaaacatgtgaaacgacagaagaggctgttgctattttagaaagagcaccgcatcgtcatgcgtttaattattccatttatgaccgcagtggacagggagcagtagtcgaagcatctggacgaggcgttcatgtacaaagagggacgatgatggggtgtacgaaccattttaatcagctggtcgaagaaaatcgtcatcatttggtagagtcaaaggaaaggctcgatcatattcgagatcatattgaaaaaaagctatcgcctcttgaagctttttctttatttaatgaagatgaatacggtatttttaaagaagattaccggaattctgctggaacgcttcatacagtagcatatgtaccggagacgctgcaagtcattgtggggattggacgaaaagcaaagcctctcattttctcgtttgaagattgggtgaaaggagaacaattaactataacgaaaataaaaggaacggtaaatacagatgaaccatttccgtttcagtaaggagcagcataatgagaattgtaacgaatcaagagatgtatcaagtggatgattatgtgatgaatacaattgggatgagtgaagagtcccttatggaaaatgccgggcaggctgctgccaacgcgctgagtgagcgaatcaaaaaacatgaaaacatagggctgcttataggaacgggaaacaatggaggagacggctttgttattgcccgtgctttgaagtcaaaaggctatgaagttgacgtctgggtagttcctgcacgggaaaaaataaaaggcgcggctaaaaaagccatgatcatctatgaaaatgctgggttcacgtggcaatcggctggagacaacttctctgtgaaaaagtatacggttcttattgattgtttattaggtataggcgtaaaaggcagcatcaaatctccttacgatgacattataaaaaaaataaacgattctaatgcttacatatacagcatcgatgtcccaagtggagtaatggaacagaagcaagagcttacggtacgtgcagatgctacgattacgcttcagcagccgaaagtcacggcatttacatacccgagcaaagaaagttacggtgaattgattgtagtagatatcggtattccgccgctagcaattgaaaaaagttcatctcttaaggaagtatggtcaactcagcatattaaacaatcttttcccattcgaaacgcttcgtccaataaaggtacgcatggaaaaggaatcgtaataggaggttcactccaaacacccggagcgccaatgctaacgtccaaagcagcactcacaagcggagcggggcttttaactcttgcgcttccgagtgatattcatgcgattgcagctgctcacatgttggaagtgatgtacaagccatgcctaagcaaagatggcttttttgcaggcgagattcctttagaagaagaaaagtatgatgcaattgcagtgggaccggggcttgggagaacgaaagaaacgaagaaagttgtcgagcaagtgcttcaacagccggtttctgttgtaatcgacgcagatgctctttttcatctgccagatttgatgaaagaagtaaaagaaagagaacacgcaacgattttaacacctcatccgggagaaatggctagactcgtggatacatcaatctcagaagtagaagagaatcgatttttaatatctagacaatacgcagtggaaaatggtgtgtaccttgtattaaaaggtccaaatacgattgttacaacacctgacggaaaacaatacgtaaataccactggaaatgcgggacttgcaaaaggcggaacgggtgatacgttaacagggatcatcctcgcttttatcatgcagcatgattctctgcaagaagcaataagcaatgcggtatatgttcatggaaaagcagcggatgtgctgctcgatcaggggcatacaatgatagatatattagcaagcgacgttatttctgcacttccgtcagtcttcggccagctgaatgagaagtaatttcttctggattattaaaatttgttgacaaaatccttcaaaaagttgtcaaaactctgtgtaaatgataacgttattttacgtaagattttacatagaaagaaagtgatgttgtgtactactcaatgagaccaagaggcattcatttagccgtgcctacacttttcttccttattacagtcgtgttatttgcgatgatgcagtttggtttttatttggattccagcattcttcgtaaaatttgggtcatcattatggctttattgcccattgctggactaatcacggctattaaaggtagaagaggaagcgcaaagccgtggttaattatagggaacgtgattcttattttaaccgttacaataatgagcgtacaggctattatttactaaacaaaaaacgtgttcgccaaaaaggcggacacgtttttattaggaaagagaaacgatttgcttggttacataggcagcttctcctgcgattaccacaccatacgtattctctttttttgtgatttctacatgaacgaagccatctctatctatttcctgcccttgttcaatcacaaattgccagcggtcggttttttgttgatccacatatctcgcataataggcgcccattacgccagaagctgttcccgttacagcatcttctaccgtacccgaaaatggtgaagagaaatgtcttccgtgcatatgagcttctggatggatcgtgtcaaaacaaaagggatgaatagatgcttttggcatatcagttaaaatatgagggaaatcttcttgattaggcttcatctttttacaggcatctaaattttttaaaggtacaagaagcgtccagtttcctgtgcttccatatacaataggaagtgtttgatcaaggtcatcaatatgaagattaagagcttttgccagtttttcttttgaacctgaaaacggatgaaactgcggagaagcttgactcatggtgataacaggctgtccgtttctgctctgtaccgtcatcggcaaaattccagcatttgtttccactgtaaatgtagtttttggaagtttatttttactatgtaaagcataaagagaagcgacggtcgcatggccgcacaaatctgcttcttgtccgggcgtaaagtaacgaattcgtaaatcagcgcggaaagacttcatgataaaagccgtctcgttaaactgtgcttgataagcaatcttctgcatttcttcagctgaaaaatcatctccgttaaacacaattcctgcaggatttcctttattagggagcgtgctaaacgcgtcgtattgatatacagtcgcttctttcatagaaattacctccatttttatatcattgtatgaaagctttacccagtgtgttattaaatgatcgcctattaaaatagggaagtacgtgaacgttatttagaataaaaaaacagtagtttttacctgctgcttttcacttcgcaaaactattcttgcatcgcggcatttattccttcttttctaatttctagcatatgagtagcttttttatcaatatctttagctgtatcggaagaaatgacgcctacgctgcttaagtcataggcaagacttgtaacaagcagctgctctctttgtgctagtgtgccgtatgtaagtgcagcggttttagcttgaatgccactcatatttaattcgtcagtagaagaagctgcttctttttttgcagctattgcttcttgataaagagaatcatatcctccaaaccctacttgggcaattagaaagttataaatgtcatcggccgattttttagaaggctgagaaaaagctctttgaaatttattgcgcggtagaaagtttagtgccgcctgtcttccatcttcataaattttttcttgtatttctttagtagctttttcgtcggtttttttctgtgctgcatctagctgtttgcgatatttttgaataatgaccccgtcctgctgattgttcccctctttgaaagtagctgcggcttgtggaacatctgacgttgctagcgtctcagcggcgttctctgaagaagaaaagaacgtatttttaacaaaaataagtgcaaagatcaacaagataaaccataaaaatctgaatttcttaaacaaaatgttcacctctgtataatacttctaaattatgtaaaacaacatggaccagtatacaacaattttagtgtttttttacacatttacccaaaaataagaaaatagtaagaggtggttttattaatctaatagatatataggttcattgttatggttctaaagaaaccattgatctatttgtactgatttacataatcaaatatgtttttgctaataaggcttaaagtgacaaggataaaaagcgttcggacgtacgtcacgccttttgatagagcgacatttgacccgacaaaagaacccgcgatcatcgcaacccccataattaatccgtaagaaaatacaacagaatcgaaatataaaaacacaagcaaagcacctaagttactgccgaaatttaaaaattttgcgctgcctgctgactgcaggaaatcaaatcccataaataaaaaagcaaataaaataaatgaacctgtgcctgctcctaaaaatccatcgtaaaagccaataataaaaataagtgcggtaaagaaaataagtttcttaatagacagcggcttatacgtagacgtggtgccccagttttttttgaagattgtataaatagcaactaaaacaaggagaatcaaaataacaggtttcaaaaaagcagaggatagaaaatgaacggtgattgaacctcctaaagaaccaataaatacaaaaggaaaccatttacctacgacgcgaaagtcgacttttccggattttacaaatcgaatggtactcgttaatacgcccatcgttccggctaatttatttgtagctaaggcagcagcgggaggcaggcctaaaaataaaagagcaggcgttgaaattaaaccgcctccgccaactacagagtcaatgaatgcggctaaaaaaccaaatagtaaaagcaaaagaacaatctgtaaacttaattcttccataaagcaccttcctcatgtcataatatatagtgactacttaaatagtaactatataaaaagcagttgtaaatatgtaaatgataaaaatttcaaataacttaaaaaacagggaggtttcctttatggaaaatattattcagcagctgcagtcgcttggatttaatcagtatgaatcaaaagtatacgtgacgcttgtcaaaaaaggatcttccactgcttatagcattagtaaacattcaggtgtgccaagagcgcgtgtatacgatattttacaaacactagaggaaaaaggcatggtgttaaaagaagagagtaatgatggcacccagtacacgtcgttgcccgtcgatgcttttttgcattcgctgcaaaaaaaatggaacgaaacgtatgaaggcgttagcgaaacgcttaaacgtcttgaagctgcagagtctatagaagaaagccgggttatgacgatgaaaggagaaagagccattcttgctttttgtgagtcgctattgttaaaagcaaaaaataaaattgtcatctcgctttggcccgatatttataatgagttgaagcctcttttattacagctaagggagagcgtcacactaaaaggaattgtgtttgaacaagatgaagcgatggaggaatttgaccggcaccgccatacaagctataccgaaaacattgggaatcaaaactggtttattatatctgttgacagcagtgaaatgatttatggtcataaagaaatggcgtactatacaaataacgcagtcaacattaatttacttgaaaattatatttggcatgatattctcgttaacagacttgtagaaaaaagtgatagagaaatggacaggtggatcgaaaaggaaagagaaagtttttttgcgtagaaaagagacttagacataacgaaatcacttccatcgaaagacgaacaaacgggataaatgatctagtatgaatgggttgttacatcgcagttaatttccgtgcaaggcttcgctttccgcggccggccgatgagcctcctcgtcgcttacgcgcctgtggggtctcatctgttccgcttttcccgcaggagtcttcgccttgccctccaattaactactggaagcagccaccatgcatgaaagctacgttcgtcctaccaacagaaaaatccgaacaaagttgatgctccattaagagtctcgagtcctcgttcggatcttccttcaattaaaatatttttgttacagcctctttatattaaaaagtttgggcaagtttttttgcttctgctattcctttttctttaatttcttgggctttatctggcattgcgttatgcccttccacaaaaatgccgtctaacgaaggtactccgaagaaattcatcataatcccaatataacgatgccccatttccatatcagctgcaggcccttcagaataaatgcctccgcgcgcttgaatatgaagcgcttttttatccgttaatagcccaaccggaccctctgccgtgtatttaaatgacttacccgctacggctacagagtctaaataggctttcataaccggtggaaacgaaaagttccacataggcgttacaaaaacatatttgtccgctgatacaaactgttcgctcaattctgcaaggcgattgaccttctcctgttcatgagaagaaagttcagagccagactgaagtttgccccagccgctaaatacatccgcatcaatatgaggaatattttctttataaaggtcaatatgtacaacttcgtcacttgaattgtgctctttgtaagcatcgataaatgcttttccagttgccatactgaatgattgagactcatcgtgaggatgagctgtaatataaagtacttttgccacgtcttatcatctctttcttgtttggaataatgtactgtcttatcgttatcactcctataaaaaactatacgcgctttgtcaggaaagctaaaaaagaacgcaagaaagggatgtctatatagaaaataatggtataataaatgtttgaatatttacataacaagtatgtttaacagaagtgaataagaggtgtcgagatgaaagaaaaatggataatcgttacgggtgcaggttctggaattggcaaagaaattgtaaaagagtgtgtgtcgaagggctattcagttattgcttgtgatattaacgatggagctttgaaacagctagctgaagatacaaagggccatattgaaacacacgtagtagatgtaaaaaaaggcaacgatgtaaaagatcttttttatcaaataaaagataaaagcttgtatgggttagttaataatgcaggcgtgtatttagggaaaaatttattggactatgaagaaaatgaaatagattttgtaatggatattaatattaaaggatatgtttatttctccaagtactttggcgaagtattaatgaaaaaggaagtagaaggagcgattattaatatatcgtccgtgtcaggaatggaaggaagctccgatgctatatatggaatgtctaaagcagcaatactaggattaactaagagctgtgcaatgaatttttctccttatatccgggtgaacgccgtagcacctacaatggtaaataccgatatgatgaaaaatattccagagtggcgcaaaaatgaatacatcgctcatcagctgattccaagctttgttacgcctcaagacgtggcagatacggttctttttttactgagccctcaagcaaaacattatacaggagccaccttcgatttaaatagcggatgttatttacgataaattatcttttaaacgagtaatcgaggctggacaaaaatattttagttaaggataaattcgaatgatcaatcgatattattgactgaccattcggattttttactgttattatgaacgtgggtttcaccgcttctagctgttgattggagggcaaggtgaagactcccgcggaaagcgaagtcttgcatggaaatcaacagcggtgtcaagagcaatccatatgagtttattaatccaatttgctcgtctttagattgggttaattccgttatgtcccatcctcctttttgttttcttaagaattcttaagaaatttacttaacgtttctttagattttttttctattctagaaagaaagaatagaaagaaggaatagaaaatgaatttagcttttatgtatcaatattttcaccagccgcgaacggtaggcgcacttttgccgagctctacgcacttagcgaaaaaaatggtaaaagggattgattttgaacatgcaggctgtatagtagagtacgggccaggaaccggagtttttacccgtgaattaataagaagacgaagcgcttgtacaactttgcttcttatcgaatacaatcggcatttttacgaaaaagtaaaggaacaagtaagagatgaaaaaaatgtgtatgtgatacacggatccgctgaaaatgttcaaaagtacttgatacagtatgatattccaaaagtggattacgtactatcaggtcttccttttgcttctttaacgtctgaagtgtcggactgtattttgcaaaacacgcgcagcgtattagcggaggaagggaaatttattacgtttcagtatacgagttttaaaaaacagctgatccgctcttttttccctcagattaaagtggaaaaagagtggagaaatgttcctcctgcatatatttttacatgcgaaaagaatcagatataaggagtttgtaaatgaaagacagaattttaattatagatgacgatgagcaaattcgtaatttaattgctatttacttagaaaatgaaggatttgaagcgctgaaagtttctaatgctgtatgtggattagcgcttttagaggaacaagaagtagatttaattatattagatattatgatgccgcagatgaatggaatcgatgctgcttttaaaatacgtgaagaaaaaaacatgcccattattatgctgtcggctaagtcagaagatatggacaagatttctgggttaacagcaggcgcagatgattacttaacaaaaccatttaatcctctcgagctcatcgcacgagtaaaatcacaaattagacgctataaaaaatacaatgaacgtgctgagcgcgatattattcaaattggcgatttggaaattaaccgcagcacccggcttgtctttgtgcgcggccaagagattcgtttaacaccaaaagagtttgatattttagagctgctggtacgccacaaaggaacggtgatgagtatggggaaaatatatgaagccgtatggcaagaagatgcttttaaatcggataatactgtaatggttcatattacaaagattcgcgaaaaaattgaggataatccgaaaaagccaatttatattaaaaccatatggggcgtaggatacagaatatgagaagaataagtgtaaagcttctttttgctatcattataagttttttggctaccaatttaatttttattttaattgctaggtttgttttgagcaggtatatacaagaagagaaaatgaatgtccctgcatataatgtattggcgtttggacttttctttatcgccgttgtggtctttgtttttgtttttttagcacttattcgttcccatattcgttatctgaaagaaatctctaaacaagttcaaaaaatttcaaatggagatttaggcgcaaccatccatgtacgaggaaaagacgaactggctgaattaagccaaaacattaacaaaatgtctgcgcagctccgtacaaaatttgatcgtgaacgagagctggagcaagtgaaaaatcagctaatatccagtgtatctcacgatttgcgtacgccgttaacatccatcgtggggtacctagatttaatcaaaaaaagagaaagtatggatgatgaaacattatatagctacttatatattgttgattcaaaagcaaaatacttaactgatttaatagaagaattgttcgactatacaaaattaacgagtcctgatcttcagcttcaacgaaatgaggtcgatatgaaacgtttgcttcaacaggtaataggagagtacgagccaattttaacaagagaaggcattgatgttcagactaactttgcttgtgaatggaatgcatttattgatgtggaaaaaatggtaagagtatttcaaaacttgcttgaaaatgtcaagaaatacagcaaaaagccttccttattagaggtgaatcaggagattgacgagggttacatagttatttcctttaggaacagcattaacatcagtgaaaaaattgaggtagaaaagttgtttgatcgattttatcgaggtgatgaatcaagaacggacgcgaatggttcaggtttaggactggctattgcaaaacaaattattcagctgcatcaaggagagatacgagcggatcgtcagcataataagctcactttttttataaagctgccgttaacacaagaaagccttaagaatcacttgtaaagattcttaaggctttttgcgactattttgatgccgtattcaaattctgcaagcgtcgcataagaaaaggatattctgatatgctgtgaagtctcatggtcatacaatgcgcctggatttaaaagaactccttcgtcgagacagtgcttaaataacttccgcatcgaaacaggcttatgcagcgtaagccaaaaataaaaaccaccgctcggagcattccacacagcgagattcttcaaatacttctctagaatagccagtgtttgctgacatttttcttttaatttatagcgtacgctggccacatgcttgtcatagagtccggttttgagagcttcagcagcagcccattgagataaggaactggctccgtagtcaacttgcattttaaggtcagctaatcgctcaattacatgttcaggccctataatccatccaattcgaaatcctggactgaatgttttagagaacgttcctaaataaagaaccattccatttttatcttgagcttttaaggaaagtggaggcggtgaatggaaccaaagctctccgtaagcattatcttcaataataggcaaatgcattctttcacactggcgaagcagctcttggcgccttttttcactcatcgttacattggtggggttatgaaagttcggtattgtatataaagctgtacctttttctttttcatgttggtcttttaatgaagctaaatgaattccttcttcgtctaacgaaacacccgttattttcatttgtgcggactgaaataacggtagagaataaagataagaaggtttttcagctaatatattggcacctggaggcagcaggccgattgaaattaactgaagggcttgaagtgaaccggatacaattaaaatagatgaaggagaagtttcaatgcctcgtttttttacatgcttgactaactcttgtcggagttcatcatttcctcttgggtgctcgtagcccaagtgtacgcttctatgattaattccgctaaatagttccgaaagctgatgggaaggaagcaggtcaggtgctaactctccagttcctaaacgaataatgcccggttgaaattcagcttcgttaatatggcggatagtcggagaatttggtcggtatattcctgcttctacatacgaattccagttcatgtgagaacctgatgctagtaagctccacgtattgttaataactttggtgccaccgcctttgtttccgctgagcagtccttcagcaattaagttttcggttgctgtcaccaccgtgcttctatttacagaaaagctagcagctaaatggcgctgcgaaggaattttagttccaataggccactctccatttatgattttctctttcatatactcttgaatttgtttgtgcattggctttttatcagccggatctggagtccagttcatgtgagaccacctttttataatttggttggtattataaatcaaaacttggatggagacaacaggggatgtcaattgtagtataaaagagaaaggagagaacaacatgtttacagtggttatacatgctttattgttagcattcggtttgattttacctttaggggtacaaaatgtgtttgtttttaatcaaggagccaatcaacgaacgttcaaacaggcgcttcccgtagttttcacggcttctgtttgtgatacgattttaattctagtagcagtgctgggagtttcagcagcagccgctgctttttcattttttcaaacgcttatttttggaataggtcttctttttttagcgtatatgggctttgtgacgtggaagagcaaaccgtcaaaaacgtcagtaaaggaaggaatgacggtgaaagcacaaattttatttgctgcttctgtatctctgctaaatcctcacgcgctgatggatattatgggcgtgattggaacaaattctctactgtacagcggaaaggaaaagtgggtttttacgctggtgacaatatccgtttcatggatatggtttttgtccttagcttttacaggaaaagcagtaggaaaaatggattcaaatgggaaaataatgatttgggtgaataaggcttctgcatgtatgatttggggagtagctctttacatggcaaaaagtatgttttttcagtaaaatagatgctaaaaggaaagttatgtaatagaaagaagtacttttttctagaaagcgaggggtaaagatgattcaaggaattaatcatatgtgcttttctgtgtcaaatttagaacaatccatcatattttatcagaaagtgctaggagcggaacttttagtgaaaggaaaatccaccgcttactttagtctgaatggactgtggctggcgttaaacgaagaaaaaaatattcctagatcagacattcagtattcgtatactcatttagcgttttctatttctattaaaaactttgacgaagcaagagaactgttaaaacagcataatgtaaccatcttaccgggaagaaaccgcgacgaaagagacagaaaatctatttattttacggatctggacggtcataaatttgaatttcacaccggtacgctccaagaccgtttagcgtattatcaagaagacaagcctcatatgacattttattcgccagaagagtagtattaaaatagttatataaggttacagttttattacattcgcattcctcgctcagttatcattaaataaacgatgctgttgtgatataatggaaaaaaagtgaggaggaggaagaatgtataccgcaaaacaggtgaagtttggttcgcatattgtgataggcgtacttttcggcatcctagctgcgatgttaatcggcactttttatcaaaatgtaccaggtgtattaccatacgggatgattagcggacttgcagtaggactcttagcagatacatattatacaattaaaacaaaaataaaggttatctaatatagtgtagtactatcttcaggagaaataaaagattcctcttgaaaatagtactatttttatgaataaaatggttaattttccactttagaaaaacaagtcagtgcgctaaaaaaattgtaaatttattattttgaatcagaaatagggggttgaaatatcaaattaactctaagtatagaattatatgttaaagtaaataaccgttttctaaacagtgaaacggtttttactttttttctagttagtttcattgcgcgtcagataaaaggtctattaattaagtaattgttagtaaaactgcagataagaggtttttaaagctgctactaacagataaaatactgttgcttttaatggttcatctatagaaaacttgataattttactaaaatcgttcttttggagtacataatatatgctatcattgttggatgaaaaaactacataccaaaaaaaggagaaacaaatgaaaaaattaagaagaatcggcctaggacttgtagcatctttgctatctattagtttagtagcttgtgggtcaacaaaagaagaacaaaaacaaggatctgctaagcaagagcagaaacaaatggggaaagagcagaagaaactcgaacaaaaactctttaaattagagagtgagtatgaagaatatacaaaagaaaaaggatatatggaatctgatgattatcttgtttttgaagcagcctttaacatacttgcaaagtcaattgaaagcaagaatattcttcaaggcgatgatggcgaactagacaaacacttaaaagacttaaaaactgagatagaccatttaagtaataatcaagcaataaaagctcaaaagcgttacggttcggcagtagatgtgtacgaagctgctataggtactcatatgcatattgtattaactaaagccgatattactcagcactttaatgcagtaaacactattgagttagacaaagattttaatgcagatagctacgattatgaaaaaattgatgcagacgcaactgaggctattaagtctatacaaggaatgcctatgaaaagaataaagcttattaaggaagagttggagaaatataaagctagctttagtactgaagaatataatcaattgaattccgcagtcactagcgtaacttcgtcattaaataaacaagttgaaatgctagaagttctacaaaaagaaagtggtaaggataaatcaactttagaagaaaacacaaaagctgctgaaacacaatttttagatgctaaagaaaaagtgtctgcatttgaatctaaatatgatatccaaatgtaaaatatatgctttaaatacgattgtttattaaaataaaaagccgtttcttaaccaaagaaacggctttttattatttctctctattgatctttggtgtacgcaagaagaaagagagtaaaagtgcaaccagacctaataatgtagcaaataagaatgcatcgttaatgccatctatagtcgaagtttttattgctttagcatatagcgacacaataccgctattacctaactgactaagttgactactaaagaaatcattgttagttgttagtgtattagtgtagtttgaaagatgttcagtagtttgctgtgtcgtaattgtaacgagtaaagccgtaccaattgaacctgcaacttgacgaattgtattacttaaagctgtaccgtgagaaattaaatgttgaggtaattggttcatacctgcagtcataattaatgacataccgaacaaacgtaagatataaatgcctaagatgtggctttatggagttccaccagtaagtttagtgaattcatatgtagcataagaagtaattacaagaccaactattgctaatacacgaataccgtatttatcatacagtttaccggggataggtcccattaagcccataattaatgcacctgacctggcaataatagtagatctgtttgaagtggcgtaaagcctcaaatgctttgtagatagattggcaacagttttgaaattatttaggatgaaacataaaaaattataatcagatttgttgaaaatcaactcgaaaattattaatgtaattttctgaaacttttcttcatgctataacgtatagtaagtataggggattttaatttaaattcctttttgcggaaaaacgtttaatatacagtcggaggatatatgctgtattacgcgacgctaggtgaactaaagaagaaaaagggggtattaaaatgacaatgtggctgtgggcaggcggatgtatagtttttttgttagcaatgggttacattgcagatcgtgtagcaataaggagaagcattgaatttagtcccgaggatggaattaaaaatgctacagatgcagaacaaatatatgtggagagctatttaaatgaaacaaaaaatacgaataataatataccgctttaatagaaattataaataaaaggcttatccgccgctacttgcattagggataagcctttttgttttatacttagttccaaacttcgtctaaagtatctctaaacaattgatctaattcatatgtagggtcatctaattctacggataaagttctgacgtatttgtctaaacggtcaatttctaagtttaaaaattcattaataacattgatgcatggttctaaatctaactcatcaccactaattttacgctttaacagcttgctaacctcttcttttaattctccttctggtaacagtttctctaagagaatagagaattctaatggaggaaattcgttatattgctcaatccacttagcagctaacacaggtcttaaaacataaaaatattttttgatttttacttcgtcaccttgtaaatactctcgaaagttatttctagccatatttaaatagtggtatatacaagaagtaggagtaaagatgttagaatgtagttctttcattttatcaaatgttgaatacgccttgtaatatacaatgtttgattgcatccattctagtaagggcgggtttgattttctaaaaagttttaatgtcttggttaagtcccagccgctaacatctaataggccattaataggtagctctattacatctcgctttttacctacacccattggatcaatgcttaaatatttattcctcttatgaatataaataaatctaacatcataatcactatctttagatggaaagtcccacgctctacttccagattcacaagcgtataatacttttacgtcgtaatcttcttcaactttctttaaagctgcaacgattgtttctctcataacccaacctcattttcttttaatgctttctatatacaaaagctattactatttctcctattatatttcataatggatggaaaatggtaaataaaagaagcttcccttaggcctctaaaaatctacgaaaatatagagagtaaaaaattatatcactcaaaaagcactacatccaatccgtttctgcggtaacaggttagaagcgtatacagttctgcacggtgatggtataaatgagactgaatttcaagcagccactcaaaacatgtatatgtgcatccccaataggatgtctgcagtgaaaatagcttttgttcgtcaaaagaagagtaaactgcttttagctgattgaagccctctactaaagctgctttgagttcaagctttgtataagctggatgttgcaaataaaagtcattcattttagctgcagagtagcctaaggaaatataatagtctgcactgcaaatgagacataaatgctgcagcagctcttgaatagaccgcttgtgagggaggggacgataagcaagctcttcttctgtaacgtcattaatgattgcggttagagaatggatgttaacgtttatttgattaaacaccatctcacagtacgaattcatgcattcacatcctttttattcaaataaataccgcattttttgattcagccagtactctgatttttcattgttatcgagcttgatatagcaatcgacaatttcatcataaatgaattccttttcttctactaaatcaataaatttaatgagtaaaaatacggattttgaaacttttccattctcacaaagccattctttcatccagattaataagtcaagaagaataatctctatttttactcggatatcaaggaaccaatcgtcataaatcgttgttaaataatgaggaactaattggtgcagtcgccgtatgcagaaaaggcataaaaacaatcctcctagtgtctaactgtagcgtttgtgtaaaggtaaaattattatgataagaatagacaaaaaatgggtgctttttagtaatttaaaaatgtctaatgttctagtaatatccattatactgtaaaaccatagtgagaaataagggagaatgcccaaaaacagaaaaaagaaaacgttatcaatttcgaaaaaagaagaaaggaggagaattatgaattttaaagacgaaaatacgttagacttagaatgggttatgctcataatggaagcaaaacaaacaggtataagcatcgaggaagttagacaatttttacaaagtattagctcaaattcttagccgatacactagtaaggaaataaagaattctctgagcatagataacctttatagcgagtctcaagctatgtccactagatgtataatcatccctttacagtaagaacgtttatttataatgcacggtaaagtgaaattatggtattattatcggtaagtaagcattagtaagggtgattaaaatgacaattggccaacgtattcgagatctcagaacgaaacagggaatatcgctaacagaacttgcaaaccgagcgggtgttgctaaatcgtacatatcttcagtagaaagaggaattcagctcaacccatctattcaatttctaaacaaaatttctacctcattgaacgtgagtattgatagattgattcatgagcctatggataaatctgaatcgttggatattgatgatgagtggcttgagttagcaaaagaagcagcggagtcaggaataagcaaagagcagtttaaacaatttcttgaatttcaaaaatggcagcgggcaaagcaagattaacttcgcggagtatacataaaagagaacttacatagaataactgctaaaaaatcatgattgcaaaaaagagattccatttatctatggaatctctttttttaggcttaagaagaaataaaatgggacgagaattctttttctcgctgaaactgaatacgttcaagagttattaatttaggctttcttttctgttcaaactgtctcaatgtttctgaaatttctttgttttgataaaaaacttgatgcagtaagtcagacagtaagtcagcatcttttaatgactcgtttaatccaaaagcaccagtaggagtcatcgtatgagcagcatcccctaataataacaggtgatgctttgaccatacttcgcttatgctgctttgcacagaaagaagcgtaaagtctgaccacgacgtaataaacctttctattgaaaggtttaagctagggaaagcgtctattaaacgctgaataaacggtctaaacgattgttttcgaagagcaggatagctgcctttttcaatattccatccgatttgaacaaagccttttgcttgagaaaaaagcgccacctgctgctgcttcacaagtgcaaatttaatagaaggctcccaattggcaggtgcaggaattttcgcccaaagcaaatcgtatccatgattgtggatattgttttttatgtgcgcgagtttgcgaacagttgaatatcgaccatctgctccaataatgattttactttcaactattatttcgccccggcctttttgctgagcttttattccagtatattggcctttttcattctgcattagctctgttacttttgtgcccagcataagcttgtaggaggggtggatgcttgcttggctatttatagactgaaggagatgctgctgtggaacatgaattcctgcatgtccaagttcagattctatcgttttgaatacatgtccatccttccagtattcgaccctagacattcgaaggaggcctaagctttcaatttcttcaaatatatgatgtttcttaagaatcatttctccatcttcatttaaatgttcgcctcgaaattcttttccaagctcatcagatctctctatcagtatagttgatatattttgtttagccagtagataggccagtagagcaccgcctggtccggctcctattatacacacatctgtttgatagttcattttcttcaccttgtttgttatatgcaattaagttacttttggtaagtatattaacttttataaatgttaatgtcaacttttttatagcttttcttctatgaaattcgctctttggacaaaacacaaataaggttctacataatcaaagtcaaaggttaagttttatggtaaactaaaatacacaaattattttgaataatttgtataaaaaggtgaaatttcaaaattgttgagaaaaagcacggttggaaagctgcaggatttttagcaagaagagtagagattgttcctgaaaattctagcaaactccaatttcgactggaggatgattatgacaaaagtagaacattatattcaaacattgggtaacagtgcagatttgctaacaaaaaggcagacaagcatttacttcgaaaaactttcaaacacctttccttttttaacaatcatgcaaattaattggagaaaagtattaattaaaaagtccacccggcatattgaagaaatcaaaaaatggcttcaagagatgaatataaatgaacatcaggttgttttattctggaaacgagcaactaaagctgtaagcgtcgatttagctcaggctttactgttttttcaacaaacagctgatctgaccgaagaagcatttatttactgtccgtctgttgactatgtaattgagtattttaaagacggtaaaatgatgattggtttagcagcacgttaattaaaaggaaaaaaagctgagggaggaggcaaattagaacttcttcactcagctttttatgcatataaaatctaaaaaatacgaaacataacgttatttacaacataaattaccttctctttataattagtgggaaaagtattgacattttccataaaacaaatataattaacattaatcatattgttaattgtaaaaagagcgatcaggagaaatgatgaatgtcgaacaataaagcaatgacgaatcaaacgaaaaaagaataccctaaaccctatggctatacgtcagatattgctgtatttacgattgtgacggaagaaaaagaaccatacaaaccacctaaaatgagtttgaaattaatgcttatccaacgagcaatggtgaatgcagagggagaaaagaacagcgaagcaggaaagtgggcgcttcccggcggatttgtccatcctaatgaatcagcttttgaagcggctaaaagagagctcgaagaagaaacgggcgtaaaggatattcatttaaaacactatggtgtctatgatgagcctggcagggacgatagaggatgggtcattacaaacgcacattatgcaatcgttccagaagatagtctaataaagcgaaaagcgaatgatgatgctgctcgagttgaattgtttaaaatagatgaaatcttttcattgcctttagcttttgatcatgaaatcatcattcgagatgcaatcaaggaaattaagaaagatttattgcaaacgaccattgcccagaaatttctgccttctcagtttacatactctgagctgcaggctgtgctgcttaccgtaacggatgatgcagcgattaaaagtgatcaggcctttgcacgaaaaataagaatgctgccatttattgaagaagtagacggaaaaacaacgacgagaacgtctaaaaaaccaacaaagctctaccggtttgttgaaatgaatgtgatgaagccaatctatacagcacgctattaaaagaaaaactttcaattcaaataattaacaatatgttaactgttaatttttacatatgagggggaaacataatgaaaaaagcactgattaacatcgattatacaaatgattttgtagctgaaaacggagctttgacatgcggagaaccagggcaacaaattgaaacattcataagcgatattacgcgtcaatttattgagcaaaacgagtatgtggtgttcgccattgattttcataaagaaaatgattccttgcatccagaatcagcgctgtttccgcctcataatgttgaaggctctgcaggaagagagctatacggaaagttaaatgatttatataatgtgtatcaatcacaggcaaatgtagaatggatgaataaaacgagatacagcgcatttgctggaacggatctggagattaaactgagagaaagacaaattaccgatgtctacttagcaggtgtatgtacggatatttgtgtacttcatacagcagtagatgcctataataaaggatttgctatttatatttatgaaaaagccgtagcaagctttaatcaaaaaggccatgagtgggcgctcgaacactttaaatcttgcctcggagcagaaattatttaaggacataaaagtggaggaaatcaatgaatatgtttacagatgacagcgtaatgctacacaccgatttatatcaaattaatatgggagaaacgtactgggaagataatattcatcaaaagaaggctgtttttgaagttttcttccgcaaacttccttttggaaatggttatgctgttttcgctggattagaaagaattattgaatatattaaagcatttaaatttagcgaatcagatttaacctacttgcacgaagaattaggttttaaagaagattatttagcttacttaaaagaccttacgtttactggaacaattcgatgtatgcgtgaaggtgagcttgtatttcataatgaaccaattttacgtgtagaagcaccattaattgaagctcagcttgtagaaacagcgattttaaatattgtgaattaccaaacgctgattgcaacaaaagcagctcgaatcaaacatgtagtaggagatcaagtggcaatggaatttggaacacgacgcgctcaagaaatggacgctgccatttggggaacaagagcagcctatattggcggatttagtgctacttctaacgtgcgagcaggaaagaaatttggaattccagtggcaggaacgcatgctcatgcgatggtgcaagcttataaagacgaatacattgcatttcataaatatgctcgtcgccataaaaactgcgtgtttctagttgatacgtacgatacgttaaaatcaggagttcctaacgccattaaagtagcaaaagaattaggcgataaaattaattttacagcgattcgcttagacagcggcgatttaacatatttgtctaaaaaagctcgtcaaatgttagatgaagcagggtttacagagacaaaaattgttgcttccaacgatttagatgaagatacgattatgcatttaaagtcgcaaggggcacaaatagacatgtgggggattggtactaagctcattactgcatatgatcagcccgcgcttggtgcagtgtataaactcgtttctattgaaggagaaaatggcgagatgatggatacgattaaaattagcgcaaatcctgaaaaagtgagtacaccaggattaaagcgtgtatatcgtattattaataatttgaatgggaaatctgaaggggattatatcacgatggaagacgaagatcctcaaagcgaagaacgtttaaaaatgttccatcctgttcatacgtttatcagtaaattcgtcacaaattttgaagcaaaagaactccatcatgatatctttgtgaacggagagcttgtgtatgaaacagaagaacttcaggaaattcagcagtacgtaaaagataatttagagctgctttgggatgaatataagcgcacgcgcaatcctgaagaatatccagtagatttaagcgaaaaatgttgggaaaataaaacgcgtcaaattgcgtacgtaaaacaaaaagtagcagaagccctaaataaaaaatagtagggagctggagacatgtcagatacgcttgcttattttcaacagctaaaccctgataaaaaaatagataagcttttagaaaaaggagcgaaaattggtatttatggttcttcttttgatccggttaccaatgttcacctttggacggcatcaacggttgcgcatcgaaagaagctagatgctattatctttttgccttcatcgcacaaacgaacagataaaaagctccagacattggatgagcaccgtgtaaatatggttagcttagcgattaaagataaccccaaatttttgctcgatacgtatgagctagacgtattgcccggctatcattacacatactacactatggagcactttaaaaaattgcttccacacgctgatttattttttattatgggagccgacttactgcaagatattggtgaaggcaagtggaagaaagcagatgaacttattagtaaaaaccagtttatcatcatggcaagagagggaatagacatgttgaaagctattagtcattctcctttgcttcgaaattatgacgacggccggtttcagcttcttgataaagggctggcgatggaaatcagctctacttatattcgtcaagaatttgcccggggcggagaaccaagatatttaatgcctgatctctgttatttttatagtaaaaaatatggactgtatcagtaagaaatctacatataatggaaggagagcatgtatcatgtcagacatgcaagaaaaaataagaaaagagctacatgtgaaatctgaaattgatccagcacaagaaattcgtgcccgcgttgattttctgaaaagctacctaaagtcagcaaatgcaaaaggctttgtattaggtataagcggggggcaggactctagcttagctggacgattagcacagattgctgtagacgaattgcgaaaagaagaatatgaagcaaaatttgtagccgttcgcttgcctcatggcacgcagcatgatgaagcagatgcgaaggcttcactagaatttattaaacctaatgaaacatatacgtttaatattaaaaacacggtggaagcatttgaaagttcgtttacaggtgcgacagatatagccctgtctgattttcataaaggaaatgtcaaagcacgtacgcgtatgattgtacagtatgcaatcggaggagaaaacggccttctagttatcggaaccgatcatgcagcagaagcagtaacaggcttttttacgaaatacggagatggcggagcagacgtgctgcctctaacaggactaacaaaacgtcaaggaaaagcattgctaaaagaattaggtgcagataaacgattgtatgaaaaagtaccaacagctgacttgttagataatagtcctggtcaagctgatgaaacggaactaggaatttcttatgatgaactagacgattatttggaaggaaaagaagtatcacaagaagccgctgaaaaaattgaacagcgctatcgtattactgaacataaacgtcagttaccggctagcatgtttgatgaatggtggaaatgagagaaatgcccatattagatatacctaatatgggcattattttgactgatttctttcataaaacaaaaaagaggcggaaaaagtgcaatttaacaaattgttttctcatacacactttgttattcttacgcactttggtataatgaagtgcttttaatattattgaggaggaacattttttatggcagttgaagtaggtagcaaggtacaaggtaaagtaacaggtattactaattttggagcatttgtagaattacctggaggtcaaactgggcttgtacatattagtgaggtagctgacagctatgtaaaagacattaatgaccatcttaaagttggtcaagaaattgaagtgaaagtcgttaatgagaaagacggaaaaattggattatcgattaaaaaagcaatagataaacctgaaagaccctcatcttcttattcacaacgcccgccacgtcaggcaagaaataatgataatcgttctaaaagcaacttccaaccaaaggaaaacttcgaacaaaaaatggcgcgtttcttaaaagatagtgaagataatttatctacactaaaacgcagcactgaatcaaaacgaggtggcagaggcggaagacgcggataaatcccttccagtttaactactttattatatagctgaagcaagccaataaaaattggcttgcttctttttttaatagcttaagtgcatgcgctagaagagtaaagagaaggttaggtacttacttagttgtaaagtagatgccaatagtgacaagagatgagagaagatcaaggatgagtaggatgaaatttaaatctatcataatcatgcctccctttgtgcgagcgttgacgttagtatctgcaagatctccctttattattcttaattttttaaaatttcatttaattaagtgcgtattttatattaaattaaactatgttctaaataataatttataaaataaaaaggaagtagagatgagtccctgataaaaatagctaaattaacagaaattcggcagtattcttgtatattcatctaatctcttcataattttaggaataaaaaagttacgaaaagacgagaaccagacaaaatccttcattttttgagtattagtgcttaattttcaccaatatataaaataattccatagactcaaggattttatagtaatatatagaacttccatactattctagtttttagctcacaagctaagcaaaagattcgtatgttccggggatgaaggcatacatagtagcacgaagtatagagagaaatggagagggaaaaaacaatgaaaaaagtgtcaattcggtctgtattaagtacagtagcattttcggttgctttatcttcttttgcaatgggagcatccgccaacggaaattcaaaaccggcgcttgaaccgtctttagttaaaattcaaggagactataacttaaaatcagccaaaaaagtaaaagttattgtggagttaaatgaagagtctgtagcggaagcaaagaaaaaaggagtagcgcaaagtaaaggaaagattaaaaaagcgcgtgacgaagtgaaaaaagagctttcaaaagcttctaaaacttcaaaagtaaagcgtgaatatgaccaagtgttttcggggttttcagcggaacttccggctaatgaccttgaaaaagtagcaagtttaccgggagtaaaagctatttacccaagcgttgaatatcatacaacagaagtgaaatcgaaagaagtgagcgccgaagaatacggttctgaaatggataaaagcatttactatgtaggagcagatcaagcgtggaaatcaggatatacaggcaaaaatatgaccgtagccgttatcgatacaggcgttgattacgaccacccggatttaaagtcagcgtttgagaaatataaaggatgggattttgtagatgatgacaaagatcctcaagaaacgcctgctggagatccaaaaggcgaagcaacaacgcacggaacgcacgtagcaggaacaattgcagcggacgggaaaattaaaggagtagctcctgatgctcatttacttgcttatcgtgtactaggtccaggaggaacgggtaccacagaagacgtgatcgccggtattgaacgtgcggtagaagacggagctgatgtaatgaacctgtcgcttggagatacgattaataatccggacttggcaacgagtattgcattagattgggcaatggaagaaggagtagttgccgttacgtcaaatggaaacagtggaccagctaattggacagtaggctctccgggaacgtctcgtgaagctatttcagtgggtgcaactcagcttccttacaatttgtataaaacgacattaactgtagataacgcaagctatgcttcagctgaagtaatgggctttccaaatgacaaggcattactagatgcaagcggtaaaaagtatgaatttgtacctgtcggactcggtaaaccagaagactttgaaggaaaggatgtaaaaggaaaagtagcggttatttctcgcggcgacattgcgtttgtagataaagttgataatgcgaaaaaagccggtgctgtggcaacggtgatttacaacaacgtagaaggaacaatccctgatattccaggcacatctttgccaagtattcgcctatcaaaagccgatggacaagctttggcagcttctttagcaaaaggatccgttacgggctcttttactgcaacatttgatcagacagttgatgaaacaatggctgacttttcatctcgcggaccggttgttgatacatggatgattaagccggacatttcggcaccgggagtcgatattatcagcacagtgccaaccaatgatccaagcaaccctcatggatatggatcaaagcaaggaacaagtatggcagcaccccacgtagcaggagcagcagcgttaattttacaggcgcatccaaattataaagtagaagacgtaaaagcatctttaatgaacacaaccgaactgcttcgtgaccgcaacgggctggtttaccctcataatacgcaaggtgcaggaagcatgcgcgtagtagatgcaattaaagcaaaaacgcttattacaccaggaagtcactcgtacggcgtcttttataaagataaagggaaacaagtagaaaaacaaagctttaagattaaaaatctatcaaatcacagtcaaaaatactcggtcaaagtaaaatttaagaaaagccatcaggcaattgacgttaaatcaacaaatgatttagttgttaatgcaggaaaaacgcaaaaagtaaatctcaatgtaaaagtagatgcagggaaattatctcctggctattacgaagggacaattaccgtaagtaacaataaagaaacgtacgatgttccaaccatcttatttgtaaaagagccggattatcctcgcgtcacttctgcgtatgtagatgtactaggaaatggctcatttgaatacggcagttatttaccaggaggagcagagaagcttagctattacatttacgatgcaacgttagaaaaaggggaattgttaagttcgtatacgaatgtagaaaaaggattctctagcgcaacgtgggacggaaagattaatggtgaagctcttccagcgggaacgtattatttatacgcagaagcagtaaaagcaggtcagacgacaggttctttaggagaattcgaaattaaataaataaaaaaagagtgccagtctaactgacactctttttttattgagccgtatatccaccatcgatcacagcagcttggccggttacgccttttgctaaatcacttgctaaaaacattgcataatctgcaatttcatcaactgcaagcaagcgcttttgaggaacaagaggataaatgacttcttctagtactttttcaagcgctacatttcgcgtacgtgccaaatcttttaattgattttgaacaagcggtgtatcaacataaccagggcaaatcgcatttaccgtaatgccgtgctctgcaccttcaagagcagccactttcgttaagccaatcacgccgtgcttagcgctgttgtatgccgcttttcctgagaaaccaatcaatccgttaatggaagacatgttcaaaatgcggccgaatttttgctttttcataataggaaacgcatgcttagtcgcaacaaaaggtgcaacaagcataattttcgttaaaagttcaaatttttcagtaggaaattcttcgagcggggaaacaaattgcatgccagcattgttaattaatacatcaaggcggccatatgtttcaaccgtttgagcaatcatttgttcaatgtcactttcatttgtcacgtctgctttaatgcctaatgcttcgtagcctttcgtcttcaatttgtctgctgctttcttaactccatcttcattcaagtcagttaagacaacagttgcgccgtcttcagcaaagcgctcaccaatttgataaccaataccttgagctgcacctgtaattaacacaattttgttttcaaccatcgtttttcccccttatatgtagatgatataaaatcgcttacttttccattttatcaaaaattatcttgatttagccagttttttaactgtactttacgcgaaaagaatgggtgtgggaaggggtgtttactacctttacttccacgttgctaacagaagcgaacggcgagggaccttttttaatttcttcaataaatttttggatgttgctttcttcaccttcagcatcaatttccactttttgatcgtctcgatttcgcacccatccgttaatagagcattccattgcttttagctgcgtatagtgacgaaacccaaccccttgaacgcgtccgtctacaatcatatgcacatgttttttcactgttctcacctcacaggtaattttcccttttttataaaaaagaaaacaactacaatcttacttttcactgtataatagaaaaagacattgtaagactttaacaattataatgtagattaaattaagaaagaagggttatgaatgcaagcagcagcacgaacgcagcaagcgcagccggcaacgatttatcgtattttatttgctattagtttaggacatttcctaaatgattgtatgcaatccgttataccggcactttttcctgtccttgaaaaatcgatgaatttaaactacacgcaaatcggctggattgcctttgctttaaacatgacgtcatcgattatgcagccggtattcggcgtatttgccgataagcgtccctcgccatttttattgccaattgcaatgtgtttaagcatgatcggtatggttgggctcgctttagcgccaaatttttattttgtgattatatctgttttatttgtaggattcggatccgctatttttcacccggaaggttctcgcgtggcgtatatggcagcaggaggaaaacgggggctggcgcagtctatttatcaagttggcggaaatacaggacagtcgatggctccgctatttacggcatttatctttatcggacttggtcagtttggaacgatttggtttacgttaattgcaggtatcggcgtagtggttttgtatagcgtctctaaatggtataaatcggagttagctactcgtcaacgcttaaagaaaaagcagtcagatgcttcatttacgatgaacaagcaaattattttcgcggttggacttttaatttttcttgtttttgcacgttcatggtacggagcaggcatccttaatttctttcagttttatatcattgaaaaatttaatttgcctatcaaaagcgctcagctttacgtttttttatttatgattgcaggggtatttggaacattctttggaggtccgcttgccgatcgtttcggaaaacgaaatattttattgttttctatgttagggtcagtaccgtttactttattactgcctcatgtttctctaggagtggcagcacctcttttagtactaatcggctttattcttcagtcaagtttcagcgtcacggtcgtctatgctcaggagctgatgccgggaaaaatcggcttggtttccggcttaattgtaggtcttgcttttggaatgggagctttaggagctgttgtattcggtaaattagccgatgtcttcagccttcagtttattatgctgttttgcagctatcttccaattctagggctgttaacatggctgttaccgagcgataagcgtgtgaaagaaatgcacgaagcaaaataagaaaaagaaaaagcaaacgctaattcgcgtttgctttttctatgagcgtgaagcaaatttcaagacgaattcatatttttcttctacaatagagacaatagaaattgaaaaccgaaaggaagaatcacctatgattaagctaagcgtattggatcagtctcctgtttcaagcggatcaacaccaaaggaagcgttgaaacgcacgatagagctggctgaattaacggaagagttgggctaccatcgcttttgggtagcggaacatcataatacgaatggtcttgcgggttcatctccgacactattaatgacgcacttagcttctcaaacgagtcggatccgaattggatctggaggagtccttcttcctcaatacagtccgtataaagtagcagaagatgctcagctgcttgaaaatctgtttccgaatcgaattgacttaggtcttggacggtcaccgggaggagatgcgcttacccggctagcgctgacagatggagttcgtaaaagcctcaatgaatttccgcggcaaattcaagcgttaaaaggacatcttgagcataatttgccgtcggatcatccgtattacggcgtgacggcttatccgctgagcgaaacaaagccagaactgtggcatcttggtattaataaaagaggagcgagatcagctgctgaactgggcatctcttttacgtttggacactttatttattcagttggaggacaagaagccattcgtcattataaacaagaatttatcccttcttcgtatcaatcaaagcctaaaaccaacgtatgcgtatttgtagtatgtgcagaaacaacagaagaagctgaggaacacgctaaaacgttagatgattggctgttgaaagtagctaaaggcggagatacaacggtttcatcgatagaagaagtgcataatcgttcttattcagaagaagagctcaaaaaaataagcaccaatcgtcctcgtatgatcgtaggaaatccagctgaagtaaaacaaggattaatcgggctgcagcaaaaatacgataacgacgaatttttaattattacaaatatccatgattatgaagcaaaaaagaagtcttatgaactgcttgcagagctatttcctcaaccctcatttttttaagaaaaagatggggtttgtgagtaagctattgatatgagaggggtttaagaggggggattaggcgtttgccccatttttgccccactaattacttagataacgatctagcttagtaatgttttcagattcatatttctttgtaatatgaagatatacatcagctgtcattttaatgtttgtatgtcctagccgatcacttacaaatttaatatcagctccgctctctaataacataattgcatgagtatggcgtaaaccgtgagggcttatgtgatgcagtttagctttgttggtaatagccttcataatatcgttaattcgaaattcactaagcgctttaccattggcttgggtaatcatgtactcttgttcaatataactagctccatatttaagtttatttcttttttgccaagtttgatatttttttaactcagttaccaatgtatcatcaatacttattgtccgcatactgcgtttcgttttaggaggctttacgccgtgactgctccgtgttttagtgatgctaatagttttatctttaaaattaatatcgtcccaatgcaatgcaattaattcaccttttctcatgcctgtccgcaaaagggtaatagctacgatatattgataaaaagggcactgttttgctgtatccataaaaatggtaacttcatctcttgtaagannnnnnnnnnnnnnnnnnnnnnnnnnnnnnnnnnnnnnnnnnnnnnnnnnnnnnnnnnnnnnnnnnnnnnnnnnnnnnnnnnnnnnnnnnnnnnnnnnnntttctatatttgttgtaggttagcatttctagctctaccgctttatttatagcaatacaaaaaatcgagtgaatagcttttactgtacctagtgaataattctcagttaatctattgatgaatttctgatattctagtctaggtaattgattaagcttgaaatcacctaagtaagggataatttgattattaacgtaggtttttctgttttttaatgttcgcagctgaacttgactaccatatacctcgagccattcgttaaaccaatctttaattaatttttcccggttctctaaaagggaatgtttgcccaaatatatttgtttttctaattcactggctgcaagtttagcttctgatttagttctaaaaccaccttttgatatttctttcgtttttccacaagcaggatctacatatctaattctgtattcccacttctttcctcgctggcgatagcttgccaatctaatcacctctttaaaaaatattaagtcaatcgataagaatttctgtttcacctcctttaagtaacttgtgtttaaaattagttgtttttatgtatatggataaccccgttggcgctatagaatatttcgactgaagcaggttgagcctttaatattttctttattgcatatgatacctcagattgttttacgtctcttttaagattcgatatactgactttttcagacttttcgctgctactgtaaataatcttagttactccattactaaaaattttgattgtattcgtatctttactttggtttttaaaacaagaaacgaacgtttttctttctgcagttacatctttaaatctcaagtaaatcacctctgttaggaatgtatgttctgttttaaggtaaagttaatccttcatttactcgtgaaagagtaagtttagaggataatggtttagaagtttagctttttaatcaagcgcggaataaagattatacatcccattaattagactcagagttaagaggtaatttttctataattagcggatcaaatcctattaagtaaccatcgtaaaaagtgcaaacaccatatttttctttataccaatctaatgcttcttgtaaaaatttttctgttacatttaaaaaggaagcagtttcatatcgatttgtacaattattatgaaaagcttcaataagacgagacaaaaataatatttcgttgtagccccagcggcgagctaacttttcctgttttcggtttacgatgctatcctggttaaggatatttccaacagttgtaaagtggtgacctaactcttcagctaagatacaatatttttctgtctcatccagatttttatcaattaggatacgaccgtcatagtatagtcctttgaagccatgcattaaaggaatctcattcataagaatattgctgtatttagactgtaacttttcatatgaacttaacattgagtgtactccttttatttatcaaactgtttgctgaagacataatcgatatagtttaaaacttccttcattttttcttcagttatatctttgccttctaaatgagcagcaattgtttgaataggagtgggttcctttttattgtttagcttttcaattccaagtaaataatcaagcgaaacatcaaaataatcagctaaaaatcttgctgtatcaatccttggttcttctttattattttcccatttggaaatcatgcttttattaattgatgttccatattgatcatttaacgcctttgctaactgatcttgagtgattttacctctaagcttttttaaagtttccccaaaagaatatttcatttctttacctccttttctaacaatttagatgcagtttaattataagttatttgtttcgaaaccgcaatatttatttcgatataagttaattaagttattgacatcgaaacttttaagatgtatatttgcattgttaagtttcgaaaatgacaacttatgagggggtgatgaagtgtatgagattaaacggagacatcttccttattcaaaattaaaagcttatatggtggaaaatcgcattacgcaaaaggaattgtctaacttacttaaaatttcagcagttgcattaaatcagaagattaatgggactggaggagattttaacttgaatgaagtacgtaacatatgtcgacatcttaaaatttcatcagatgagtattttattgaacctcaggtttcgaaagtgaaaacaaaattaatggagaggataaatagtgattaatgttgagattgatgaaaatgaagttagagaattgtacttgaaaactcttagagaaaaaatagatgaagttgacgctgaacttatattttgggataccaaagaattaaaaagaaggacctgtatgagttggaatactatacaaaaagaatttttctttgatccccgctttccaaaaaggaaagtaggggggaagtggtatatttacgctccgaaagcaaaagagtttctagaaaattggttgtttgaacaatgtaacttgtaaaaggagtgaaagaatgaaatttattgaggctattcatagtcaattattgtggaacaaagagcaaataaatcgtttgagagtagagctactcacatcagatacaccaatagcaattgaaaaactgatatacgggtatgaacagcaaaatttagctctatcttttgtattggaaagggtgggtgaatagggaatggaaattactctttcgttatctacttttttgttcttaatgtttctaggtggtccatcagtaatgctactagtctttttaataatctataactctttcacaagaagaaaggaagtttaaatatgagcagtattttgatatctacttttaggtatttttgtgaaacatgtggctatgaaacattgagttgtagcgttgaggttaaactcaaatgtttatgtaacttacttgttgaacatgaggaaatagaagaagtcatcaatgaaacttattaatagattaagagagggaaaaataaaggtgaaaaaattagttagtattcaaaatgggcaagctgttacagattctttaactgttgctgaagtttttgggaagcggcatgactcagtaatgagagatattcgtaaccaaaaagtgaagttagttgaagctggaatggacaaatttatattccacaactttgtggaacgtgaatatcaatctcaacaaggtaacttttacaaaaaatatgaattaacagaggatgcatttgcgttagttgctatgtcttatgtcacaccagaagcaatgaaatttaaagtggaatttttacaagaatttaaacgaattaaagcagaattacaagggaaacccaaaattttaacggaacgtgaacaattaatggcctctatgaagctaagcatagaagcagctgaagaaattcctgtaataaaaaaggaagtaacagatttaaagcgtgtcttttctgaagaactaacccttaatcatggccaacaacaatctttgcatcatgagattaagaaacgtgttgaatcacttataggagattatcaagaatgcggttttaccaaacaaagaatgtattcagagattcataagaacttgagacgagcattttcaacacctaaatatatctttgtgaaacggaaagattatcaagaagctatcgcatgggtcaaagcctggagaccattattatgaatcataacctaattgatgtcttattgagtgaaaaataaaagcctctgctgcaacagaggcccaaaagaaaaaattcctacggatagtataacacgaagaaggagagcttaacatggctaaatatagacaagttcatacaactttttggcaagatcctaaagttttggaagaaatgacgccagaagataagtatttttatttatatcttcttaccaacccaaacactactcaaattggtgtataccagataaccaaaaagcaaatggcttttgatttaggttattctacggaatcgattaatagcctcttacatcggtttattacactgcataaacttattaaatataacgagcagacaagagaattagctatccttaattggggtaagtacaatttacataaagctggaaagcccgtaattgactgtgtaaataaggaactaaaagaagtaaaagacaaaacattgttactagatatcatgaagcatattcctaacgattcagtacttcaggctttttcacgacacgtagacgatacgcataacgatacgtcaacgaggagtggacaagaaaaagaagaagaaaaagaaaaagaaaaagaagaagaactactactacctgagaaagatatggaatcggaagtaggtaatccgtcagaaagtgaagtaagtagtcgtagtagttatcaatctatttttgatttttatcaacaaaattttggaatgcttaatccgtttattagtcagcaaattcaacattggattgacgatatgggagaagaactagttctagaagcaatggagttaacacttaaacagcaaaaagcatggaaatatgctgaaggcatcctaaaagcatgggcaaaccgcaatgttcgtacagtagcggatgttcgagtgttagaagcagagtttaaaaacaagcgtggttttaaacagagcggacgtgttcgtaaagaaatggttccagattggttatctcaagatacaggcgaagttgatagtcaaactagcactcctgttgcagttgctaaagatgaatttgaaaaagaaaaacgtaagctagaggctgaattaaaagcactccatgaagaattgaaagctggaaaggagtgactacataatagcgtttctaaaaaaagcggttgaacagcgttgtaactatttagtaaccgagctcacacgctctggatatttcaaaaatcctgctagaaagcagctatacgaattaacgttaagtgaacttgaagaaatctataaggctcaaaaacaaaaataatatgaaacgaggaatggaagggataaatttaattatcccttcccatcaatttaatcgagttctctagaaaaaatgatttcaaaatatgcggcagtaccatacgaagcagtgccaggagcaaatatctgaactaattcccatccatcctttgcagcttcatgaataatcttatggtaatcttctttaggatcgcgcgtgaaggactttagttcaactttttcaaatcggtattctttcatactctaacctcccttttcaaataattacgcttcaaattggaaaaggtttcaaaagatgaggagctttggctccttgtaaacaaatcagaggtataaaaaatgaaatgcccaaactgcgctctattaactaatagatagttgttcgcataaccgtgtagtgaaacgaacaaggttttgcaatgaatgtaaccataaatgaaaaacgtctgaagttacaaaacacaaatacattaaattgtgaaataagcatatttatattagatggtccgaaggtgaattagttacattggttatgttatatgagaaaagctataagaaagcagagattggtaggttgctaggtagagggcatatgagcatatcgcgtcataatggcaagagggggatttttagtttgttagaaaccattaagattcaggcataattaaagggaggcaatgacatatggaaattatgatcggtaaaggttacaaattaacatctgatacactaaatgttattttaaataagcgatatgatcaaaaagataaagaaggaaatatcactggtgaagcatttaaaacaatcggctattacagcaccatctattcagcttgtaacgctttgatagagagggaaattaaggacagtgatgcaattagtcttgatggattgaaaaagcatgtagaagacgttaaagagcagatatttgaggctttgaagtcgattaagccaattaaataaaaagatagctcttattgaataaaaagagctacccataaaataaattattgttttttgagactattaaaataattttctatttcttgtaaagatggggctgttttgtaataaaaggtattgtcttcatacgttaattcaaattcaggccaaggaatagcctcatatacttcacacattgaacttctagaaccggctaatttaaatttagctctatcgggttgggtggcagctatataagctagtccacttttacgacttaaagtttggaaaatagaatatttctcttgagttcctaagataactaagttagtaggatagtagacaacatcattacaaggtgtgggtaaagcaattaagtctttaactaaagcagatggagttaaaccttttgttactattaccattctcatcacctcttctatattagatagactaattattactcaaaatggtgagttttacaaactaaataattaatttgtaaggattttaatgagaaaagaacagaatttctctcagcagcgctaagaatggggcagagaaatattgaccataatgaagagagatttagttatttaggagatgacaagatgatctatatttataactgttacggaggcacacattcatcagcattggcagctgcttaccatctaaaaaaactacctcttgatagagaaccaactgataaagaaattttaaacattgatgtttttaataaattgactcctaaagatatggggaagttaatttttcatggatatgatgaagacaaaaatgaagtatacacattaggaagagggtcttcaaaagtggtggttcctgctatgtatgacttagccgatctgctaaataaaaaaggaggattacaaacaaaaatacttttctccaatacgtctcccaccgtgcctttagctatgacactaggaggttttttttcaagaaggttaaaaattaatgtaattggcgtccctttattaataataggtactaaacaggcacataaaaaaatcattagattagtggagcaaacaaagaaatctgcaaaagtgactgcatcaaaaatagaagttttagataatagttttagcaagcaataaacatgttttgataataaaaaagcgcccaactaagagcgtcaagttttcaggtggtgaaaaaacgggtctgtaaagagtattagcaatatgtatagtttagaacataaaaagagatgctcggttaaagcatctgaaagtgaatcacatggattatcaatatattgtaagtaagcaacttttagaacataaaaaagatgcccatttaagggcatccttaatgggaaaaccacatagtagaaggttattttattatattctatataaacgaaaaaaagaccaagatttctcttgatcaccgtatttacattttagcataggagggatccaaaggtgggaaaccaattatcatttatgcttcctgagatagacagaaaagagacgcaacaagcagtagaagatgctttagaaaaatatagattgtttaaatacttatcttttgaagaaagggaagtttccattactgctagttctgaagttcgttatcatggcccaacaaatgaaacgagtgaccaaacaggttccattgcagcatataatgtggaccaggaaaagatgagaaaagacttctgctttcgtgtggaaagggcagtaagtcgtttgccgaagatggaaagattcttaatcgaagaaagatacatgtccttagaaacggaatatttaacagactacaatgtgtacagttttaaattccaaccacctatttccgaaaagacatattctaaaatcagatggaaagctttttataaactagctctcaatctaagcctagttgttctcaaaaattcataacgggaaaaataatccaaaaacattcctaaaataaatcgaaaaaaactcgaaaataagtcgtggtacttgctttagtacatggtaaatttatattatcaagaaaatatcaaagagagagcgttcctaagttgtaggagcgcttttgttatgtctgaatgtatttgcttttgttatgtctgaatgtatttacattaaaacttatttaaaacgtcatatgggtgaatcagaaagtctacaattaattaagaaggtgattgtaatggaaattaaaaatcatcttaacacagaacaattaagtcacctagaaaagatgggaaaacgtaaagaaaaggttaactggaaggacatcatgggaacaaatagacaaactttgaagcgtggccgtggcggggcgatgaaaaggaaataaaaaataaataatctttagtataacaaatgattaattgggcatattgtgaataccgactagtagtttaagttcctactagtaggacggggagaagcacatggtaagtagatcctcctttatatctctgaaaagcaccctcctctgtgggtgttttttattttttgtacagtatagttttgaaaaaagaacacatactatgagtagtcggcgactccctttgctgacgaatcgtttctcctttaaatgagaattcttccaagaagcaccctcacgggtgtttttattttgaaaaaatctgttaattatcccttcttgcccaatataattaaataagacagggggtggaacttaatggaagataattggaagaagttatatgctcgtaaaaatgaaaattttacctttgtagaagaagaggtaaagcaactcttagaagaagttgttaaagtaattaacaaccacctaaataacgttcatgttagaaacgcggaaattaaagacacatatattgatttcccagactgtaaggttacatttgaaattgataaaaagcagattatctttgtaaaagaagataatgtaggtggcttacaaacacaagctgaacttgttattagtgaccgaaacttaattacctttgtacaaacagaaaaaggatattttgattttggtgaaccgttaatagatgaggtacttaggtatctgttagtggattaaattctataccgaagtagttaaaaaggatgctgattcgtcagtgtcctttatttttttctaaaaacagaaaaatgtgttaaatatttctttccgtccgatataattaggacaggggggtgattctagtgaaaatcttggtgaaatttaaagacggtatggtaatagaagtaccgattcaagagggatcaggctttcttggacaaggtaatctgcttgaattaatccgaaaaggtaaagaactaaatagtactattcagtttggtgatttagaacgaagatatagcgatttgtactcttacgaaattattttgtaaaaaaagagcatcctttcgagggtgcttttttatttaataggttcaacttaagttgaccatctaaagttaatttaggttgagcttatttaacgttagtaaaattatatgtaacatatacttctacaagtaggaaaggaattacttttttcttatgtgacctttaggaaggtaatttttaatactaataaatagattaagcactttaattaactttgtagaataacatgcgaaaaacaattaaaggagtagaaaaaatgtattatccgtatgattatagaaattgttgttcatgcttatgttgtcctcaagggtgcagttgctattgtggaaatgatcctacagataatggttgtacctgtcacttggatccgtatattaaattaaagtacaatactgtacttttagagatgaaaggaacgaatgttcctttaatacaactagctattttctttgaacatgcttttcctgagcaaattatgattcctgttcatctaactaataaacaagttagttttgattttagaaaccaacgtgttaaagacattattcaaaggttggggttagttccacttagggacaaactgatgcctcgtgcacaatcggttggaaaaggaaaaagagattactgctgtagaacttactttattgatagtagcactggggagaaacatttcataaaagatcataactattcttcatatcctcagttggctaaagaaagatgtcaattatatgctctagaagatggagcgaatagctcagaatatgatgagggacattgctaactttaacatgttaagtgtgtaaaaagcgccctccttcgtgggtgtttttatgttcagtaaggtataaaaatactaagaaaagcaaagactgtgaatggtcgcttctgctggctaccaattactttcatcttcaaggtttacgtggatagcgcctcttccgtgaggtgctattttattttggaaaatcattaattggcaagatacttaaacatacaatacacactaataagaaggtcatcatactttaatgaaagctttcctttaaaagttgaaacaaagtaggtgattaaatgttctattctaatttctatactccttttaactatgctttctacccttatttcatgccctcttttggacgtcctactggatatgtactgaattctagtggtgaagttgacagttggtgggggaattatccattggggcaccctgctaaggctccaaaacttggggttgggggacagacgcctatttcaggacctgccatacctttcagtttcaggggttactattaaaataattaacagaaggatactaatttattagtgtcctttttttgtctattctgtctatataatatattcttgttgaaatatattccaaataaaaaacttaaaagtattcttagtatatacaaaaaagacatgggctggtgcatagctaatgtcttttttggtactagacggcttaaagtgtttatttaaatcagctgtataagtattaaacttttagaattttattattttttcagacataggtatatgtctatgctttattactgattctacatagtctagactgtaacctatttgaaggagagataatatgaataacataagacaaagctttgataggcatggaggcatgggaggatctctgggaggatctcctggtatgggtggattccctggcatgggaggatctcctggtatgggtggattccctggtatgggaggatttcctggtatgggtggattccctggcatgggaggatctcctggtatgggtggattccctggcatgggaggatctcctggtatgggtggattccctggcatgggaggatttcctggtatgggtggattccctggcatgggaggatctcctggtatgggtggattccctggcatgggaggatttcctggtatgggtggattccctggcatgggtggattccctggcatgggtggatttcctggtatgggtggattccctggcatgggaggatctcctggtatgggtggattccctggcatgggtggatttcctggtatgggtggattccctggtatgggtggattccctggtatgggtggattccctggcatgggtggatctcctggtatgggtggattccctggcatgggaggatctcctggcatgggtggattccctggcatgggtggattccctggcatgggctaggagctatagttgttccacaataactaaaaataaaagcgaactctcttatttctattaagggggtgcgtttttattatgagaatagtaattttgcttttatgagtactaactatttaaaacagcctataaaagcatacttttaagagcggtttatctctgtctaaaacttatgactttctgaacgatataaattaaaggatactgattttttatttttgagaacaggtgattgtcactctttgtcgaattaatagataaaaaggtgatacacatatgcttaaacatatgcttaaatttaaagttatttttgaatttataaatggcaggacaaaagaattaaaatttgaagccacatcaaagaaagaagttattagtcatataacaaaacatgaaaaattcatttcaaatgaaaaagagctagtgcacatcaatttaaataatgtggtacagtttgtggttacagaagaaaaaaataataataataaggtaagaataaataactttttgtcgaatagaatagacaaaaggtggtaatagatatgaccgataaaaattggattaatgcttatgtttctaaaatttcaggaaaacatttcgaaccgttactgattcaagatattattgactctttcattgagatgttaaatgtaaagctaaatgataatcaacagcctaaagccaattttaataaagaagaaaatgaaatttcatttccagactgtttagtttcttttaaaattcaaggatctgtattgagtttgaggaaagttttaaaatctaaccatcaagttgcaggtggaattaaaatttttgatacaggtttggcttatcatttaaaatctggtgcagagttgattgaagaagttgaaactatctccgaagcattagatagggcgctaggttatttacttttagagttgaaataaaagttaatattttcataagtttaagtcactctaatgagtggctttttattatgtctataatacgtaagttgaaatatgcgctaaataataaataaaaaaagaaaaggtggcaatatagatgagggatgataagtatacactaatctatgcatctaatattccagaacctaaacaagacttattatgtatcatattggaagatattaatagcgtacctaaagataaggatggagcagtgattggtaaggcaaaaggtaaacatccagaaggtatgattgttataggagataaaccttatgaagattactttcgagtccatacacaagatgagaataaggttaagtaatgaaagagtataagacaaaggaacagaagttaaagttctacaagtcaaaagaatggaaacagctaagacttaaagtattagaacgtgataattatgaatgccaagaatgcaaacgtaatggattagtttacacagataatcataatcctgataaacataaacgtttagatgttgaccatttaaaagagattgaaaattttcctgagcttgctttggatattgataattgtgaagtgaaatgtgtaaaatgccacaataaaaagcataatcgttttaaatttaaaaagaaaaataataaatggaacgatgagaaatggtgaagcatcccccgtcaaaatattttgatgtcaaaaaattagttggggaacgaggagggggctcgattttccaaatttgccgcgctttttcgtgagactattaaattgggattaattgcaagtgggaaggaggggaccaggtggctaaaatcaagcgggaaacattgcggaaacggattgaaaaagatctaagaaatcagctaagtgagaaaaagattgtaggaaatcactatgaagatttggtacaagactatttatctttatgggatttaaaatgcaatcttattgaggacatcgaaacgaacggaattaaagttactggtatgcatggccctaagtccaatccttccataaacgatttacataaaacgaatgatcgaatgttaaaaatcctagatgctcttagtttagaagcgtctccagaagaaaagaattctccttcaaaacctaagcgctctgctaaggatttagtatgataagcaacaaatacgttgatgaatatattcacctttacgaaacagggaaaattaagctaaataaagagcgcattatgcttattaagtacctacagaaacatgtacttgtgagggatgatatatatttcaatgaggaaatgattgagaactatataaagttcacagagaaatggtacttcaagctgcaaccatttcagaagttcatagcgccatttgtctttctttattacaaagaagatgacagcgttttttatgaccaattttttataaccatgtcccgtggtggcggaaaaaacggttttatctctagtttaagtcacttctttattagcccgctgcatggtattcctaaatacaatatctctattgttgctaataacgaaaagcaagcaaaactctcttttaaagaggtttatgattgtatagaaaataacgaagtgctcgaagatcttttctatcgtaccaaagtcgaaataatgggctacgatacaaaaagcattatgcaataccatacatcaaatgccagttctaaagatggtttacgtgatggatgtgttatttatgatgaaattcatcgatatgaaaattttgatgttgtaaatgtattctctagcgggcttggtaaagtgcccaacgctagggaattttttattggtacagatggctatgttcgtgaaggattcttagacaagatgaaggaacgggccatgaatattttagagggcaaagatttagatgatcctctttttccgttcatctgtaaaattgatgaagccgaagaagttaataacccggatatgtgggaaaaggctaacccaatgtttagtgagccaagaagctcatacgcaaaaggcttatttaaaaaggttttaagacaatttaaacagctagttaataatccatctaacagagaagagtttatgactaagcgcatgaactttccagaaacggatctttctaaaagtgttgcgtcttgggaggaaatttggagaacgggttatgaagaggacggaaaaacacttagagaaattccagacttaaaacatcgtgtagctgtaggtggtcttgactttgcaagtatcaaagactttgcagctgttgggcttttgttcaaagttggtgaagattatatttggaaaagccattcttttgttcgtaaaggattcctggacaaagtgacgttaaaagctcctataaaagagtgggaagaaaaaggactgcttacaattttagatgaaccagttattaatgttaaacacatagttgattggtttgtagaaatgcgtgagctatacggggttaatacaattgttggtgatactttccgcttagatctagtcaaaacagctttagaagcagaagggtttatattgctttttataagaaatcccaaagctattcattctcttttagctccacgggtagaaacgttatttgctaataaccatattatttttggtgataatccaatgatgcgctggtacacaaataacgtcctggtgaaaattaagccggatggcaataaagagtatttaaagaaagatgaatttaaacggaaaacagacggatttcaagcatttattcatgccttatggcaagcggataatcttctcactgatgaattagatttcatgctatccgacattaagttttaaagggggtgagaacaattggattattagatgccatttttaaaagagatagtgaacttggatatatgtttgatgtagaaatgtttgttgaaacagcaaacagagtccatatgaagaaattagttttagatacttgtattgctttcttaggaaggacaattagccagtcagaatttagggttaagaatggcaaaacatttgtgaaggatgaactttattatcgcttaaatgttaggccaaataaaaatatgacagctagtacattttgggaaacgtttgttcacaaattgatttatgacaatgagtgcttaattattcaatcagatgatgatgatctgcttattgctgatgattttcaacataatgaatatgcggtatttgaagacacgttttcaaatgtaacagtcaaggactatacatttaagcgggtttttaagcagagtgatgttatccatttgcgataccgaaacgagcggttaacaccattaattgacggtcttttcacagattacggggatctatttggacgaattctaagttcccaaaagcggaaaaatcaaattcgcggtactgtcgatatggatatgataggagctaaaagcccacagcatcaagcgaagctccaggaattcattgataacatgtataaagctatcggtgaaaaagatgtggccattattccgcagcaaccaggctttaaatattcggaaacgtctggcggtggaaccactggccaaagcgtagatgaaattaataaagtgacaaatggtttctttaatcaagtagcaatggccttgggtattcctactagccttgtatatggagatatggccgacatagaaaaacaaacgaaaaactatatgctttttactattaatcctttgcttaaaaaactagcggatgaagcaaatgtgaagttttttgagcaagaagaatatctttctggccaaaaaattgatattaaaagcatttcttatcaaagcttatttgatcttgctacagcgattgacaaacttatttcttctagtggctttactggtaatgaaattagattggaggcgggttatgaaccttccgatgatccgaacctggacaaacattatattactaaaaactatactgaaatgaacaaagttgaaggaggtgacgaacaaaatgacggtgaaaattgatgttaaagggccaatcatttcaaatgatgaagcttggatttatgaatggtttgatatggattttactagtccaaaaacggttattgaccagttagctaatgcaaatggtgaaaatgtaattgtatctattaatagtccaggcggttatgtagatgatggatcagagatttatacagctctgaaagcttatcctggccatgtagaaactcaaattgtaggtttagctgcaagcgcagcatcttttattgctactgctggtgataaggtagtgattgcaccaacagcaaagtttatgattcataatgcttctatgggtaacttaggggatcatcgttcgatggaaaaagcttctcaaatgttgaagacaacagatagaacgattgtaaatgcttatgtattgaaaacaggtaaagatgaacaagagcttttagatatgatggcagaagaaacatggatggggccacaagaagcattggagcataattttgtggatgaaatcatgtttatggacaatccaattaaattaaccgcttctagtgctatatctgcaatgattccacaaaaaattattgatagctttagaaatggaatgattaacaagggtaagcctgaaggagtaacaaaagaagatctaaaggcatcacttgcagaatttaaaaatgaaattctgaacgaattacaacttaataaaacaaacgaaccaaaagagcctactcttaaaccagctaataagcgggatttgagtaagctctttttaagtttataaaattggaggaagtcataaatgactattaaatttaacaaatcagaagctatgaatgaggctaagtcaaaattagcagcggttttaacaaatgcagaatctacagaacaagaacaaacagcagcctttcaaacttattttgataccttgcagcacgaagttgcaaacaacgttcgtaagcaagtaaatgatgaaatgcttgaccgctctattcttcagcaacgtggccaaaatgtattaacttctgctgaaatgaagttttttaatgcggttgtacaagatggcggttttaaggatgattctattcttccagacacaacacaagaacgtgtatttgaagatctagtaacagagcatccattattagatgctttagggttacaagatttaggtgcagtaacacgttttatttattcagatccagaaggtgcagctgtatgggggccattatttggtgaaattaaaggccaaattaatgctgccttccatgaaaaacaaattggccaattaaaactaactgcctttgctgctattccagatgatatgctgcaattaggcccggtatgggtggagcgatatgtacgaacagttattgtagaagcttatgctgtagggttagaaaatggatttgtaaatggtaatggtaacaatcagccagtaggtctattaaaagatgttaacgctgaaacgggtgcagtaacagataaagcatcatctggtaaattaacttttaaacccggtcgaactactgtaattgaattaaaagacgttgttaaaggtctttctaaaaatgcaaaaggcaaaaacagaaaagttgcagggaaaattgttatggttgttaacccatttgataattttgatattcaagcctctgctactactcaaaatgcaaatggtgtatatgtaacaaatttaccttttaacccgcaaattgtagaatctgaatttgttcctgaaggcaaagttattttctttgttaaaggtgaatatatcgctgctgttgctggtaactaccaattgaaaaaatttgatcagacgttagctattgaggatgcaattctttacacaatcaagcgctttgcaaatggtttaccaaaagataataaagcgtctgctgtttatgacttggaaattgatgaatctttagaagcggaagcacccgcaggagcataaaggagctgaagtgattggaaatcacagataaattacttcaggaatttaaagatagaatgcattttacacataaaggggaggacagcaatttaaaagaattgttgtccttttctattgacgatattacacggaaatgtggagcatttaacattgaagaaaacaagggagcaaaagaattagtctttgagcgtacccgctacgcttacaatgatgctcttgaatactttgacaagaattttcaaagtcaaattaacagtgtaggtttttctataactatgggaactacagaaggtgatccagatgcagccatttaaatatacgcctccaagaattcatacaggggaattaaaaacatgggttactttttatgaagctaaagagaacgaagggccattaccaggagagaatccaaggaacgtcctttatgaatgttgggccaaagttgatgaagtatggactaaagatatagaaattgccaagtcaaatggtactttatcagacttaaccatttctattagagatcctagaggtgattattcaccaacaaacaaacattatgtgcaagttcatacccctgaatatgagggtttaagatacaacattaaacaggcttttcctgacttacagaaccgagatttcattaaggttatagccgaggtgtcaaaatgagtgttcaaattaaaggtttaaataacctgttagcggatttagaaaaacgccttggccctgctaaagtaaaaagtattagtgaccaggctttaaaagagggcgcaaaagtttttgtaaaggaattaaaggcgcaatttgaatcctttaaagatactggtgcatccattgatgaaattacgatttcagagccagagtatgttgctggtgtaagaacaattaaaatacattggcgtggccctaaagacaggtatcggatcattcaccttaatgaatggggaacggttaaaaaccctaaccctaaaggtaaaggagctattgccagagccatgcgtaatgcggaaaatgcctataaagcagcggtgagagaagctgtaaggagaggtatttaatgctctataaagtatacgatgtactaaatactagtgatcttattaaagaaaaagtaggaaaacaaattaagttttataagtacccatctactgataatatgcaaggtgtttacatcgtaattgatccaatagatgtacctaaacctggcgattatgcagataacaaatggttaacagacgaatatttttatcaaattgaagtctggtctatgaatctgtttgatacacaagctgttgcaaaagaggttcgtaatgttatgtggaacgaattgggttttgctcaactaataccaggtcttgatgaatttgacgaagatacggggatttaccgcgatgctaggcgctatcgcggtaaagagtatgtagaaatataaaggaggaatttataatggcagaagaacaaaagaattatcatgcttctacaggtgtagatgaattttactatggagaagttggagacggtatagttgcatcatatattgagcgggtagaatatttacaaactattgatgtagatatgcctcaagatattacccgtgcttatggagacaataaaacagcggaaatggctgtatcaaatggtgacattaaagttacttctgcttttcataaaatccctatggaagacaaacaaagacttttaggtcttgaagttaaggatggtattacctatatgggtagtaaagataatcctccatacgttgcaaccatttttgctaaaacgtatgaagacggctctaaagaatatgttggcttgccaaaaggtttatttacaagaccaaaactttcagggaaaactaaagaggatggaacagaattttcttctgaagaaattgaagcacagtttatggatcgtaaaattgatggactagatgaagagaaatctgttgcctttgctgttgataaaaaaggcgaaacgacaaatcgtgatgcattatttatgaagatttttggtaagccttatcctggcactactacagaaccagcgggggcgtaatctatggccagcaatagaaaatttgaagtcattgaggattttaaggatttacaggataaaaataaaatttatcgcaagggtgattggtaccctaaaccggcaaacaaaaatattaatgatgaacggttggaagaacttttaaccaataaaaacaaacaaggtagaccagttattaaggaattagagcaagcatgacgcttgctctttttattcatttaaataaaccaaaatagagagggagttttttaacatggcaaatttaaaacgtaatatgatcgaattaattaaagaggtttcggaggacggagaaattcttaaatcagaaaaacatttaacacccgcatttatcccgcttactgttgtatatcaagcaatggatctaactgccgatatgcaaaaagcaaatgctcaaaatgagagggaattaattgatcgttttgttgattttattgttcatgatgtatataaagataagtttacaaaagatgatttaattaatggtctacatgctccagatgctatggagattttacaaaatcaaatccgttttgtggctgctggtcatcaaagtgatgaaacaaaaaagtttttagagaagaagaattgagtgatgaagatttcacaccagaaaagcaaaaagaatacctagataattttattatgtccttaatgaaagaaggtaaggatattaaccaggtgttagatatgccctttcattttgtcttggaaatcttacgagagcgaaataaacctaaacaagaaaaatccttaattgcagcgtttggtggttaaggatttttttgtgttttcaagaagggagggtgaattttgccagaacgtattgaaggtatgtccattgggctggaattagaaacattgcagcttgaacgtggtctaacaggtttgaaagatcggtttaagactgtaaatagtgaaatgaaagccaatttatctgcttttgatagaggggagcagtccattgaaaagtatgaagtcactctacaaggattaagtaagaaattagagcttcaaaagcgaattgtaagtgagtcgagggccgaatacgaaaaaatggttaaagagcacggggaaggatctaagcaagcggaagcagctgcaagaagttttaataatcaagtagccgctttaaataatttagaacgttccgttaatcgtacaagccacagcttgacagagttaaagcaagagcaaggtgctttgcagtctggttggagcaagatgggaagtttgattgataaaacaggttcatctttaactgggttaagctctaagatgcaaggagtcggctctactttatctagctctctaacattatctattgttggagcaggggcagggatcatggggctagctactaaattcaatgactcttcagtgaaaataagtaactctttaggtacttctactaaggagacaaagaaatttactgaagcctcacgaaacatttataaagatgggtttggggaaagtctggaagaggtagacaatgccctacttgaaaccaagcaaaatattaaaaatattaatgatgaagatttagaggacattactaaaaaagctctgactttagctaatacatttgatgctgatgtgaacgaagtaaccagagcgggaaatagtttaattcaaaactatggtatggatgcaaaagatgcctttgatctaatggccaagggtgcccaaaatggcatgaatttctcaaaagagatgtttgataacatgtcagaatacaccattagttttaaagaggctggtttctctgcaaatgaaatgttctctattctttctaatggggccaagaaaggttataacttagaccgtttaaatgatacaatgctagaatttaagcttcaaagtgaggattctagcaaagcgtatatgggtgctatggatcaaatgtctgcaagcacacgaaaagtatacgaagagtatcaaaatggtaatgcaactgtagcggatttatataaagcggtaatacctgacttgcaaaagatgaaagatacaattccagcaaaagattttaatgtgattgggaaagcactttttggaacgaagtgggaagatcaaggggccgatgtagttttatccatgaaaaccgttaataaagagctgcaaaacagcaagggtactatggataaaatgactaagaacgtagaacagtcctttggtgctcgtctaaagtctgtttggcgtgaagctggtatggctctgctgcctttcggggagatccttatttcatttgctgaaggtattttacctaaagtatctactggtattcaaatggtatctggtttcattaaaagcttatcaccagcagcgcaaacagcgggccttatctttgctggaatgttagcggcacttgggcctgtaattactatggtaggtatgtttgttggtgctataggtaatcttttacctgtttttacaccagtaatgaatgctattgcacgggcgggaggtttattaaatgtcctaagagcggggcttgctgctttaactggcccggtgggaatagttataggagcaataaccttattaggtgctggatttatagctttatacaagaactctgaaacctttagaaatggcgtttccggcataatgagcggtatacaaaagtttggccagagtgcgctaaacatcttaaaaccagctattgagtccgtgaagcaattctttcagagtcagctatccgtaataaagcaattttggcaggataactctactactatacttcaggccctttcaaatataggcagcgtagtacgtgtagtttttcagggtatttcttctgtaattggctttgttatgccttttgtactttccataattaaatcggtgtggggaaatatacagggtgtcataagcggagcgctaaatattattatgggcttggtgaaagttttttctggcttatttactttgaatttttctcaaatgtggcagggattgaaacagatattttcgggatctgtccaattcatttggaattttgtgcagctgcaaatgttcggtaaattactttctctaggaaaagtctttattacctctttccgtggcgtttttgtcggattgtggaatggcttgaaatctttattttcttctagtgtaggggttttaaggagttcggtagtttcaggatggaatttgctgctatcaatcactaaaactatttttaatgcttatcggtcattcttaactggaatatggaatttcttgaaatctatgatttctaaaacggcatctggaatagttaatgctgtccgtggttcgtggaatttattgaaatctgtgacgacaactatttttaatgcataccgctctttcctttcaggaatatggaatttcttgaaatccatgatttctaaaacagcatccgcaatagttaatgctgtccgttcatcgtggaattccctgaaatctgtaacaacaagtatttttaattctgtccgtagctttttaaactcaatctggacagggatacgcagcacagtaacaaatttagcctccagaacaaaagatggagtagtaaatgcttggtcaactttgagaaataaaacaactgaaatgtttacaagtattaaaactaaaacaactaaaatttttgatgatatagtttcaggggctaaaaaattacctggtcgaattggtgacggtatccgcgcaatggccgggaaagtaaaatctggcgttgatgctattggtaaaaagcttgctggcggtcttgaatcagttatgaataccattactcaaaaaggtataaacgttgttttagataagatcggtgttagcaagaaaagccaaattcctagattagatattcctggttatgcaacaggtaccgattcacacccaggcgggtactttttcgcgggtgatggagggaaaaacgaattaattcgcttcccggatggtcgtataacaatgagtcctgacactactactttgtattggggagataaaggtacccaagtattaagcggaaaacaaactgatgaatttttaagtatgtatccaatgtataaaaaaggtacgggcattaaggacgtagctaaaaccgctggtaagtggcttaaagatacagggggccaagcattagccaaagcgggagaagtaaaaggaaaagtgtctgattccatcggagatatatggtcttatatggataatcctaaaaagctaatgaataaggtctttagttcccttaatttgaaaatgcctgatgttggcgggataatgggcgagcttgctaaagcgggtgtcacaaaagttaaagatggtgcagctaactttattaaaaagatgttcggtgattttagtgcaagtgtagcagctcctgctggtaagggtgttgctagatggcgtcctgtcattcttaaagctgccgctgtaatgaaagagtcagtaactgatgcagatgtaaacgccattttacgacaaatccaacgggagtccgggggtaacgaaaaaatcactcagtcaagtgccgtgtgggacgttaatactgctgccggtaatcctgcacgcggatttgtaaaatagtccggtttaaattgggtgaattgctggaaaatcctaaagctatcttgctacaacgtaaccggaaacggtaagcgtgaatgcttaaaaagtagatagattggacaatcagcatccaagctcctgtctcgaaagagtggagaaggttcaacgactacgcttaacctacggcaaaaaagctatggtgatgatgcgacagcgcccaacactttaaaaaagtgatgatatagtctaaaccgtttgctacgagcaaagttaaagtatatcgaaagatacggtattaattgtattacagtatattcctcaaacattcaacgcctataaggtcaaaggccataataatatttattcaggctatgaccagttattagctttctttaataacacaacctggaggcgtgataacccagggggcacgcgaggatgggggccaaggggcagacgtaaatataaaaacggcacagggttatttggtcacttaggcggagacggtatcttgggtgatgggggcaagagagagccattcttaatgccaaatggcttattaggtttaagtccagatagcgcaacactttaccctaatttgccaaaaggaacaattgtatggccaagcattcaagaattcattaaggaatacagtgaggcagctgcatccgtaattgctactaatgaaaatcaaagaacggatgctatgaagttattagctttagctggaaaagaacttcaaagaaatacgcgttcaaatcctgtatcttctcctagtggcaatgcttcaagtgcagatcaagggcagcagcaagtacagtctattcatgttgaaaataacattactgttgcttattcaggtttgccaaatagggatgatgtcattaagtttgctaaatggctgcaagagataatggacgaacaaacagaacaacagttaagagctaaaggagtaaggtgggtagtacatggccagtcttattaaaagttttgcaggggttaacacccctgactttttaattatagataaagttcatttgccgcctttgccgccttctgaactaacatctattgatatacctatgaaaagcggttcacagtttgtaaataaaaagcatggaaaccgaacgataactattgatttaaccattaaggcacctgaccgggataaagtaatgtctatgggggatcaactagccgattttttacatcatgatgaaccacaacctattatttttcgggatctgccagggcgcaaatattatgccattttagacggtgacacggatcttgaaaagattgaacatctaggaaaaggcagcattaagttaatttgtcatgatccgcacggatatggggagcaaagatcttataacatcacctctgatactactatgttagtgaattatggtaatagacaaacagctctacaaatcagcatgacattcactaaaaatgtaactgacttttttatagcaacagacaagcaaagcctttattttggggagccttttgatccaacagaaaaaacagtaaccgatacaaagccagttattttaaatgatcctggcagcagcacaacagattggttacaagcaacaaactttaatgtagatggtgggcgtgtattaggtaccattggatctaacggttattcatttagccaggcaggaaaggattatggtacattaagcggcttatggcatggcggcagcatggtacgaagcttaacaaagcaaattcaagattttgaattagaatgtcaggtaggctttgcatccagtaacaaaaatcaaaagggcagaattgaaatttatctgctcgatattaataataatcagctagggaaaatagcgataagagacatttggaataacttagataacccgcagtttgaattttgggtaggaaaagtaaatggtggcggtgtttctgttacaaatacctacggggcttataaaggcgtattttctgattttaacgggattatacaaatgggtagagtcggaaagaaatggcattgctacattgcaaaagttgatcctaacggcagagcgcacaccagacactataaagcctttactgattggcaaaacaaatatatgcaaaaagtggccaagattcagctgcatattgctgcctatgataaagagccagcagtagatcaaatgtggatcagtaatgtttactttagagaaattctatctaaacaacctaatcaagttgactatgtttttagaacaggtgataagctgctaattgattgtgaaacaggggaaatttataagaatggaaaactctttcttgaacggttatatccaggatcagaatttttacttttagataaggcagcaaatggccttgtggtttctgattactcagctattaaggatggaaaagtaacctttacagaaaggtggctatagattctaatgtggtatattttgaacaaaacttatgatgccgtaggcgttttaaataataagattcctaaaggctgtcccatccttagagatagctggaaaggtcagctagaggatggatatacgacattagagtttgatgtctacgctagtcacccacaagccagctttttgagtaggggagcttttattatttataccgataatccagatggctatgagctatttaggattacaaagactacggagagtcatgggttagaggaaataaaaacagtctattgtgaaacagcagcaacccaggatctaattggccagattattgagccaaagtcttttgtcggggccagcttatccgatatagttaaatttcttttgagtaatacaggatgggagctaggcgtttgctattatgatgaaatcatttcagtagattttgacgattacccaacagctttagaagccatccgaaatacgattaaacaattcggtgcagaaattgaatttaaggtagaattcgatggacaagaggttgcgcggaaagttgtaaatctctatggaaaacgcggcacaaaaacaggtgttagctttgaatatgcaaggaatttagagggcttacgtaaaattgaggatggaaataaaattgttacggctatgatcggtattgctagtaatgaggacaaaaacggaaatcctattttacttatgaatgctcaaaagaaacctccaaagggttttgaagtagtgggaaacatgattgtggatgttaacgcccttcaggaatatgggaacaatggcgcaaatgtagtcgataaatttattgatgaaactgcaacaaatccagtagagctttttgataacacaatagaagccttaaaaaaagtaaatcatcccgttttttcatatgaggcaacagtcgtgatgatggagcagatagaaggatatgagcatacaaaggtttctattggtgacaccatttttataaaagatatatcatccgagccgcctacttatttagaagctagaattttaaataaagaattaagcaccgtccaaaaggataaaggatctattgtgcttggtgaatatgtcccgcttacaattcaaccaattcaagcggtagaaaaggcgcagcgtacccttcagttaaaggaaaaagtatggaatgccactattgaccgggcgaaagaggcccaggaaggcgtagaagaagtaaaaaagcaagttccttataaggtagagcttgtttctagtaacggcacaacatttaaaaacggcctgattgatacagagataacagctattgtctacaaaggaaaagagaatattaccgctacacttccaaaaaccgcttttatctggacgaaaaaagataaagacggtttttttgatgtggcttggaattatgagcatgtagggataggtaacaaaatcacagttagttcgtttgatgttgttcaacgagctgtctttacttgtgatttagatttaccagaggaagaataaaaacatagaaaagagtgaagtgtttatggcgacagtagctacaggcagtatgacgttaatcgatgtaacagatgcaaaacaactaatagcatttatcggttcatcacaacaaagacaagttatttataatcctaatggcggttcatatacaccgaactatgccagctcaaataacgtgttaacacctcaattgtatattgcagggactaacacaaatattgcagataaagctaaatcaattaaatggttctatcaaacaaatagcagcggcaatttcactgaaattacagcgagtaatacaaactatactctaggaactacagcacctaaaacattaacgattaaggggaatgtacttgcttctgctaactcaatgacttacatgtgtgaggttgtttacacagatccagacacgggctttgatgtaactacaaaagcagaatatgaaattattaaagtaacaaatggtacaaatggctccaatggggcagctggtcaagatgctgtaagagctgttgtatggacaccagacggaaatgttacacgtaattcaaatgggactgtcaaagcaactgttgatgtatacaaaggagcttcaaaggtaacaccaacagcttttaaatggtatatccaagatcctgctgctataacgtcaagcggtggggatgcagatgggggcgctggttggcgcttacttacttctacttcaaatgcaggagtaacaggctatacaacagatacaattacgattccagcaagtgcaatccctagtgtagaggctttcaagtgtgttgcaacatataacaatgtaaaatataacgatgtttgtacagtggtagatgttagtgatccatatgtagttacaatcgtagggacaaatacttttaaaaacgggcaaggaagtacaactttaacggctaaagtattccaggccggggctgaagtagatgctgcaggaacagcttttacttacaaatggtctatatatgatgcaaacaatgttaaaaatacaaactggagtaaaacaggaaaatcaattaccgttaccgcagcagatattaatgttcgcgggaatgtaacatgtgatatagataaagcttgataaaaggagcgggaaaccgctctttttattcgttcttgaaaggagtaaatagcaaatggcacctttagcaacaggaacaatttcactagtggatatgaacgatgctattgtttcaggaacagcaccagaaaaccctactgttgggacgttgtggctagacacaagtgtaacccctaatatgatgaaaaaatggggcggttcttcatgggtggatattggagagcttgatcctaactattcagatacgattgaaaacataaacaaaagcattgatgatattacaagcgacaatgtaattgattataccgaacggaaaattttaaaagaccgtattactgaaatcatcggttatgtcattgcggataatgccacaaccctgccagctgcttctaccctggatagtagcggtaaaggagagttttatactgttcggaaacaggcgttaaatgcgggcatttcaacagctgatgcaacttatattgaggtagctactcaatatacgaatttaaaaacctatttagaaggtcttacacctgttgatgtttgggatctatccacggccaataaagcaaaaacaatcgctgttacaaaatcaacgtttcgagataggtttttgcaatacgaaaatgcagtcaatgcactagtagttgcaacagctgccaagcaaaaagacaattcggatgcagcggataagaagggccaagatgccctcgatgacttgggcctttacggtgagaagtggacggatgcagcaaataaggttggtctatggaaatataaaggtgatgaaactaaattcaatggtgcagtagtagctacaggaaccgtttttgcacaatctcttttactagctgattggacaaatctagttgaaaatcctgactttgaaaatgataccataggcgagtttcccaacggttattatccgagttatgaagccaatagatccaaaatgagagtagaagatatttcaggctttcaaaatgggaacggatcaaacaaagctctggccatagatgctttatcaagctctaataatagcatctatgtaaataaccttatacctgttaatcctggcgaagaaatgtttattcaagcggagggccgctatttaaatacagctggttcgggtgatgggcgggtaggttttttatgctatgacgctaagagacaatcattaaacatctggaataccccgctaagatggaatgaatcaacgaaaagaaccgcttttgttaaaaaaagtggttcttttgttgttcctgaaggtaccgcctatttacagttttacatgagcttttcgtctaatggagaaacgacaaacaaattttatgtagacaatcttatttggcgaagaaaagcgggtggcgatttaattgttgacggtggcattgagggccgacacgttaaagctaaatcagtttcctttgacagtttacaaggtggtatcgctcaatttggtggatcaagtaacggaaatggacggattgaagtttacaatgaaaacgatgaattaattgcttcactggatgcggcccagggcggttttagtgatttatatgtaggtaattttgatagccctacagtagtcgagtatggagcggatgatataaacctttttgtctcagacaggcttttagaatattcaggggctattgaacctaacgatgataacgagggcacaggatggacaaagccgcttgcaacagtaacagaggctataagacgtattccaaagtattacgatggaaaagcgacaattaacgtagcttataactctttgatgtatgaaaactttgaaatcagcggatttttaggttctggatctatcaatttatcactaggtagcgctaaattttatggaaatccagtgattaaaaacaacttgttaaacattttttctactggtggaacaatcaatggtaaaaagcttgattatgcagtcgtaagcttattacgtaattcttatgtgcgtttagaaaaaatgaaagtctatggtaatggatctagcatgaactttgatacatcggcagggttcacagaaatggaccaatgtgaaacatatggtgctgatttgggtattagttcacgttatggtgggcgtgttttcctcactaactgtaaaggaagcgccacaacttacggtttgcattgctatggcggggatatttttggccagggaacagctccaagtggtggaaataacaataaaggtgaagttgcagggggccaggttcgcggtgccttcacttatggaacaactacaggaggcacaatggatgctcaacctactactgtaactattaatgcaagtagcggtgatagctggcgtgataactttgggggccagtggtacggtcaaaatgaagttgtacaaggtaaatggggcagctatggcatttatcgtggcttatggttcttttcattgccttctctttctggaaagacaattactcaaattagaatgtttgtacaccgtaaaaaagcgggtggaaatgccgctcctgttactacgtactttaaaccgcatacctacacaagcaagccgagcggtgcgccttcttatcagtcaccacaaacaacagcaagctttaagccaaatgaaggaaaatggattactattcctagctcattttacgctggctttgttagtggatcttataaaggcattggaatttatattaactcaactaatcaaaactactatgcaaaattcgatgcaacagcaaaattagaaatcacttataaataaagactgaaggagcaaacaaacatgaaatttgtatctttaaatattgaaaacaaagtaggaaacatcattgaaaacattgtgaatcatacatctaaacttgatcagtttgtttatacaacagcagagggtgaatatggtgttttatctggcttccaggtaggttattgcgtaggagaagataacttagatcctgatactgtaacaccgcaagttgtagccaattatttaaaaccgttcaaaattgaggaattagagcagcaatgtaacctggtcattgcttcaggatttgaatatacaaatggtgataagtttttatatgggccagatcagcaaaatgatttttctcaaaaacaaattttacttttattaaatccagctttaactaccgtccaagttcaaacaaagaacaacggtattaaaaaatatacaaaagaagaatttattagcctggtcacttatgcaaattccttcaaggatcagcttattaagaggcttgataatctaactaaggaaattgatgaaacagaatataccgatgtccaggagctaagaaatttaacgtttgttgaagatgtatccattcttacattagatgctgaataagcatctttttttaattcttaaaggagggagtaaaggtggaacaaattttcaaatggttactaaccgtttctggtggagtaatcgcttttttatttggagcgtggacacccatgttaaatattttggttgcgttaatggttattgattatctgtcaggtatggcagcagcatccatgaacggggaattaaaaagccgtgttggattaatgggtatagcccgtaaagtatttatttttgcaatggtagcggtcagtcatttggtggatctattgctaattgaaaacaaaattgaagttggttatctagctatgagtgttgtaattaccgcttattgtctaaacgaagtgctttccattgttgaaaacgctggaaagatgggtgtttatgttccagaaacattaaccaaagcaattgccgttttaagaagcaagccgcaaaaagaagaggaaaaacctgttgcaccttcaaccttagaagtgccagcagtcgttgcaccaaatccacctattgttacagcagaagtcaaaaaagaagaaaaagaagaaattaagtaagtcgctgtttatgcagcggcttttttatatcaaaattttgaaaggaagatgaaaatgtataagtttgaaaaattaccgcagttagttgataaacgaggaaaattagctcataaaggttcatacagcaagcgtacaaaaactattactacccgtgtatggcatcattcattaacaaaattatcagctggtggatctaaaattgaatcattcgcggattttcatgtaagaacaaacggctggccagaaattgcttatcatttaatcattgatcctaaacacgttgtgaatggcaaagccactatttattactgtgtagatatttctaagaaatcttatcatgtaggtaacagtaataacattggcttgggtatttgtgttattggtgattatcgaactgataaactcactgatcctactattcgttcaattgttgatcttcataaagctttagttgctgatggaattggaaagtatgataaagcccataatgaaatgcctggctactcttggaaagcatgttgcgtatttgattataataaggcttttaaagatgtcttagatgatatgctgccaggatctaaacaacctgatccagtaccagggttatatacaattcaagaaggcgatacattttggagtattgctttaaaggatggaaaagaaggtattactgttgaggatttaattgctgcaaatcctggtgtagatcctagtaagttgaaagtaggccaaacgattaaatttggatcagctcaaaattcatatacaccaaagccagaaacacctaaaaaagatcaatcagaatataaatatcctttaccttctggaatacttaaaacgggatcaacagataaaacaggaattaaacaacttcagaatgctttaaatgctgtttattttaaatgtggtacagcggatggaatttatggagctaaaacaaaggatgctgtcgcacgcttccaaaaagtttatttaccgtatgaagtagacggcacgtatggcccaaatacgaaaagtaaattacaagctgtcttgaagtctaaaggttattgattgaagtccctgctctttggagtagggatttttattctaataaaggtaactgcttttttatattgagattaatcaactattcgtagacagtgaaaaacctcctaatctaatggattaagagatcttttatatatatggatatgcttctttaattacgaaggctgtggtatttggtcttttgaaataacagttattaattcgattggttctagtttatctccttcttttagatggaagagataaacctgtccacttttacgattttctttctctttgaaattgaaactagcttcaaaatcaaatccttttcttatgcccccagggaaattgattgtgaaggcattcataacctctgtattatttaatgtaagtgcattttccgaaaaaccagagttgtacataggtgcatttaatgctttgaattctccttctgtttgatcaagattggtagcagccacaatagttccacttggttcgaagaagcgttttgctcttattacataataaaaagagttaaaattctcatgtgttacataagcttgtaaattattgaaagtgggaatatccttctttttcttctccactccaggagaaacaatatcttgtatttgtcgaagagtagtttcgataccgttagtactcatatctaaataactgagagcagaaatgatttttggtacatttatatcttctgctcttacaggaatgaattgtatacctgcagaacgttcttttaatgcatttgtccattctagagtgaccatcggactttttaagctgttttcagtaataaagtagaagaaaaattggcatctttctagtccttcattcattctttcgataatgttctcaccaggtttaattgaccaatcatcataaaaaacattatcctctccataaatttcttctagctgataagcaataggactaacgatttctttatctttgtgttgatgacttataaaaatcattagacgttcccccttttattatttttttcagaatataatctgaatatcgataagtatagcactttatttgtaaaannnnnnnnnnnnnnnnnnnnnnnnnnnnnnnnnnnnnnnnnnnnnnnnnnnnnnnnnnnnnnnnnnnnnnnnnnnnnnnnnnnnnnnnnnnnnnnnnnnngtatagcactttatttgtaaaataatagattaaaagcatttctattccttaaaagataaatttatcatttaaataatgaattttttgcttatttgattgcgggcttcttttgttatttaaatattgctatgataattgaagaatgtgaggtatcaacgatggaaaatcaagaagataaatacgcaaatatagatgtaacaaaagtttatgaatacactgatctaccagacaaaatttcaggtcgctgcgataattgtggtggagtgaaatttaaaagtagtgtaggtggcggcaagtttctacgcgaatgtacgaattgtgggatgaagaagaatatataaataaagcccattgtctactattaggcaacgggcttttttattttattcagtcacttcaccgtctccaccttcaccagctacgccttctttttggtcatatgaaggatacatatatgctaacacctcataatcaaattgatctggcactttgtcagcagggatcttatcgctaaatgtttcaaaacctactgatgcacccgcatttaatggtgaatctacttggccatatgtagttccaatgaattttccatcttttgagtaaagagctgctgcaacggtaatataatctgtttgtttcttagatgtattctttacttttccgtttacatacattgtaccatcatatttacctgaatcaccttcaattggtaactctttcactgtatcatttgtataaataggagttacatttaattctgcttttccaaattgctcaactggtatatcaagatcagtatcagcagaaagatacgttttttgaccaggttttaaaatttgtggagatgtccaaatagaagaagattcttctgttgcaaggactgttccctttttatctaaaaatgttacggtcatttctgtaatatctactggaaccttacttttgttttgaacaacagcaaaatagcttgccgtagtagtttccgcatatggatcagtaaaaacataacttacttgatctacaatctttgcctttaattcctcttgtggttggctgctatttgcaccttctcctgttgttccctttgtctcttcttgggcttgatttgttgtgcttattttttcatttccacagccagctaataacatcccaaatgctaataaagttaaaccaaaagattttttcataataacggctcctttagttagattttcctgcattgacaactaatattataaacctactaaaagaacattcaagaagtagcatgtattatgcggataataaggttggatatgtttattgtatttaaaaaggccccatcttatnnnnnnnnnnnnnnnnnnnnnnnnnnnnnnnnnnnnnnnnnnnnnnnnnnnnnnnnnnnnnnnnnnnnnnnnnnnnnnnnnnnnnnnnnnnnnnnnnnnngttttaaagaaagggaagcccctaataatgtatggtccaaatataaaaaaacaactttacaatctaaaaaaatgaactaaagacctatgagtaagtaggtctttagttcattttttttacatttataagaagacaaaaaggagtaaatgctagtaatttcctgtctttttttgtagaataaaaaaagataggaagctggtcccatctctaatcaagttttatttataattgactataataaatatataataaaagtcctattgtgtctatctatatgaatctctatcctatgtataatagacaggtagtttttggtttttgaaggatgagcctctagaaaaaaggggggcgtttatgaatagcttgcaatttcaaaaagttgttgctagagatagagtgatacatgaagttgagaagttagatgttgaatgcaagaagaacgatagcatggatacaattttcaagattctaatggaagaaaattcgaaagtagcagaagagatttttgaagagtataagcttgcaggtaaaacatctctaaatgtgtttgaagtcactgattatccacaacatttaaacagtaagaaaagcctgacagcacatatacaaaaaaagttgggcattcaaacaaaagtgttagatgtaaaattaaatcctcagctgactccagaacctcagatatatcatgttgaggaaatagaagaagggcttcgtataatttgggtatccggtgaggaaaaaacatatgagaattactatgagtataccactatagttaggccgaagtatgtagtctccattatccgtttgggatcaccggtattcatcgaggtaagagcgggttatactgattcacttgcttactttaatttatttaagatactcctatcttccgataatagacctttagatatcaatcatttacctttaacgaaggttacggaaaaagaagcagaagagattgctgaaaaattaaaagcaggtctactagaaggtgaacatttaggtagtaatgggataggtaaatattctatttctgcagatagagacacaaaggatttgagacaggtagacgaatacacacaaaattacagtgggaaaaaatatttggctcagaccttaaatgtttattatgaagacatggattctggttacaaaacatatgttaagtttaggctaagtatgaacggtggttttcagtttaaaaccaaagttagtgaaaaaattattaaaaggatttttgatgtgtttaccgaagtaagatacaaacaacaagctagtggagagtgaatttcaagaggagggatttgaatgggtattaagactaccgcagtgaatatggtgttagaagaactagcttataaagaagagcaacgttttaatgctcatcaaattgccttcttatctggacaaagagatatagaagaagtgaacgaataccttctacatctatcacaagggaaattcgcaagtctaatagctaaaatagaggtactttgtgaagaaaatgatcaccctgatgccaaatataaccttaatgagcctttaccttcacatgagatttgttacatttgcggggatgaatatgttcctactatagaaaggtctcacttggttttttactttaaggatagttatatacaggaggtaaaaaaaaaagggccgggtagtcaagatgatgataaaggtgtagggttagagttacctgaaatgcgggaatttatgtacattccagacctaattcgcaaaggaactctagctatagaaccagattttaaaggaggatttttagtgacagttaaccataattacggtaatactcaccaatatggcgcaattgatgcaagagggaataaaggaaatataggacttggtgagaatgttacaattactcaaatactcaatgaaaatactgagattgctaatttgactagagaattacttagtcaattacagaatgcaaatcttccaacccaacaaaggacagaaattatagaggtcgttaatgctgcaacagaggtcgcaaatgcagaggaaccgaacaaaactattttaaaaagtcttgtgcaaagtggcaaggggctaattgctgccgcaacaacttcaacagcattaattgaagcatataatcaatggtctacattcattgggtccatgtagaagaaaagtgttcgctacttattaaagttagcgggcttttttatatgtgggcaaatgtgttattaactggaatatgaggtatcagacttaataagaatataaatttgtagatgtatatgctcatataacaaaataaaaatgtttattttatgtattttcttttttataaatatataaattttgaaggtgcgtatttagaaaggatatgtaagttactctgaagaagtgatataatgacccactacattggatggaggtactttatgaatacagccacttggtttaccgttcaaagaattgatgaaacgacatatgcaattagtgaatacggacattgggaaaaagtgcattcattcttgttagtaggagagaaaaaagcggttcttgttgatactggtcttgggatagacaatattaaaagaatcacagatcaactaactcacttacctgttgaagttattactactcacgttcatgttgatcacattggaagtcatggagaattcgaaaaaatctttgttcatgaaggagataaagaatggctagttaatagaattgaaggattatctattgaacaaataagaaaagatataaatagggaaattacactacctaagcctgcaacatttaaccccgatacataccatcctttccaaggagaaccaacaggtttgttagaagacgaggataattatacatttagggaatcgggaattgattatttaccatactcccggccactctccaggacatatatgtatttatgatgctaccaatggttatttattcacaggcgatttgctttatgctcaaacacctatctatgctttttatccttctactaaccctgtggatctagtaaactcattagaaaaaatatcaaatatagaaaatattaatgttatttctggctctcataatactttaggattgcaccctaaaatcttagaagaagtgaaatttgcagttaagtacttaaaagaacaaaaacttactaggtttgggacaggaattcataaatttaaagggtttagtattcaattttaattaatctcaaaagctcccatctagagatagatttcagtaatctcgagcaaagtctttacagtatttattattaattagagaaagtaatatttttttgagattataaagttagggggaacttctttgtatattagggaatatcaacataaagatgagagtagctgggttcgttgtagggtgttatcttttttagatacagcctattttgatgatgttcttaaagagaaaaacaaatatagaggctcttcaattgaattagtggcagtagaaaacgaacaaattattggtcttattgacattgaatatgaaaataaggaaggaactattttctctaataacgaacaggggttgggggggatgatatggcatattgctgtgcatccagattttcgtagattaggtatcggtagtaagctcctccatgtagcccaagagaagcttattatactaggtattaactatcttgaagcatggactagggatgatgagtgggtccataaatggtataggcaaaatgaatttcgggtttgtgaatcttattttcatgtgtttatcgatacaaaaaaacaattaaatgaaataattcattgctctgcaggaaatatatatcctattcaattgtttgctcattatacaggaacaaataaagagcaaataaagcgagactacaaaagagttcatgagtgttttcgatatcagaaaaacttacagattaaatagaaacaagaaggaggtttattaagtgaagaaaatgagctttataaaggattataaagacaaccatatccttcgaaaaagctactgtgaacttgcaaataatatatttggtatagactttaatgaatattacgagaaaggtttctggagcaataaatatgttcctttttcctatgtctatgaaaatcaagtaatagccaatgtatcagttaatattcttgatctaattgtaaggggtgaaaagaagaaagctttacaaatagggacagttatgactgacctaaattatagaaagcaagggctcgcgacggatttaatgaacaaagtgttagatgattatagggacagttatgactttatgtacttattcgcaaacaaaaacgttttagatttttatcccaaatttggatttagtgtagttgaggagaacgaattttatatagactttttcttcaagaaaagtatatatgaagtaatccataaactagacatttctaatattaatcacagaaattttgtataccaatttgtattgaagagattacctaattctaaaacgtttagcacactaaatgctgaagggatatttatgttttattgtttgaatgttttccaaaatagtatttactatcttgaaaaagaagatgtgattatagtatttaaaaaaaatcaagaacagctacatatttttgatattgttagtaagaaagaggtagagattgagaacatcctgcacaagattgcagacagttctattcagaaggtaatattccattatactccagaatataaaggaatcgtcttacataataaggtttttcatggaagtgaaatattatttgtgaaatcttctgatgacaatgagtttccattagactttagacacccaattatgtctcaagcataggttaataattatctttattaaaaattaaataccattctaaatataccttttatcttaatgatgatagggaatggggcagaaatattttgccccatttttgccccacttaatttaatttacaatgatatattttgaaaattagaatctaataaaagttaattaaataactttacaatagctgaatgacacattataaaacccacttgtttttttaagaaaaagatggggtttttttacggaattaaatgttagaatatttaaaaaggaggagtgacatgcacgtagatcaaaaaagtgtaagcaaccaaactaataagattacctatacacatattaaaacaggagggcctcgcatttgctttatgttttcagggctaggctatacgtacgaaaagccgctattgtattatgtaacgatgctgatgctaaaacacggaattgacgttgttcatattcactatacatatccaaaagagctcatgacaaagtctacagatgagattgcagatgttatgatgaaagacattgatctcgtgctgcaagacgctttatctcataatgactataaaaatatcatatttgcaggaaaatcgctgggcaccattccgctgattcagcgggttatgaaaggtgaagtctacaaagatgcagtgatgcttttactgacgccgcttttaaccagatcggaactgtttaaaagtttactagaaagcacttataaaggtcttcttgtaataggaactcgcgatcactattatactaaagaagtttatcaattaaaaacaaacacaatgaatgttcaagtgattaaaaatgccgatcattcattggacgttttgtataatcctacggaatcgttaaaggcgctggaaaccgttttgaatggcatagaacagcttctgtgagataggaaataaggaaaggagtacaaaatggatacgctacgtgaaattatttgcgaaaaaagagcctacagctattcacctcatactcatgatcataactacagtcagcttttgtttccgctagcaggtgctcttgatattcaagcaagtgagcagcacttaacgctgcaagaaggatgcttttacattccacctcgtcagcttcatacgtatcaagctaaaaatacaaatgaatgtctggtcgttgatattcccttgaaatttacagaaagtgcgcatcttgctcaacaagccgcttttattcaatgggattcaacatggaaagcaattcgctaccttttacttgatgggcttcaaaaaagcactgacagaggggcgcttgaagatttagtccgttacgttcagcattatttgccaaagaaacaaacgtttaaatccattgattatcttcatgctaactttaatcaagagctaaacatagaaagtcttgccaagatggaaaattaccatcctgcctatttttctgcttggtttaaacaaaaaacgagctattcgcctcaaagctatgtagcgcgtatacgtttaaataaagcaaaagaattgttaaaagagagcagctattcgataacgtatattgcgcacgaagtcggctatcacagcttgtcttcattcactaaatggtttgcaaaacaagaaggagtctcacccacgcaatatcgaagtatcttaaaaacagacaaataatatcataaaagcggaaaaacttttttctttcttttagctatgataaaagaaaggagatggaaatatgaatacttcattatcaaaaatacttattttatgtgcagctgtactatggggaacaacagggactgcccaagctttagcatctgctgaagcacattccgtggcaattggagcggtgcgtttagctgtagggggactatcgcttcttgcagcttgtcttattcaaaaaaagaaagtggacgtaagaaaccttcctattctgccccttacggttgctgcagcaagtatggccgcttatcagccgctgtttttttcagccgttatcaaaacgggtgttgcagtaggaacaatggtggcaattgggagtgcgccgcttttgtcaggagtgttagattacatagtgtaccgcaagaaacctacaaaaaagtggttgcttgctacatttacgggtattatagggtgctgcagcttgttgttaaaaaaagatagtcaaatcgacgtgataggtttaggtatggcgataggagcaggggcgtcttttgcttgctatacgactgttaataaaaaaattgttcagcatgttgatccgcaagtaggcgcttctcttgtgttcacagccgctgctgttctactaatcccatgctggtttatgtatgatatgagctggctaatttctttaaatggaatgggcattgctcttcacttaggaatacttacgacggctcttgcttatgtattattttctacagcgcttaagtcggtgcatgcgtctaccgccgtgacgttatcgttagcagagcccgttaccgcttttttacttggcgtctttttcttaggagaatctctaaccttggtgaacatatgtggagcagcactagtatttgctagcttagcgtttttaacgtattctccgaaatcatcgctaaatcaagaggtgcgtatataaaaaaatcccctttctctagagaaaggggatttcttattaagcgtacatgctagctacttgtttttgcaggttgctgtcttctaaatactcatcatacgtcatttgcttgtcaattactccgtttggcgtaatttcaattacacgatttgcaatcgtttcaacgaactgatggtcatgagatgtgaaaatcattgaacctttgtagctgataagtccattgtttagtgctgtgattgattctaagtcaaggtgattcgtaggatcgtctagtaaaagaacgtttgaaccgcttagcatcattttagaaagcatacagcgaactttttctcctccggaaagaacattggcttttttcaacacttcttcaccagagaatagcattctgcctaagaaaccgcgtaagaagctttcgctttggtcattaggtgaatactgacgcagccagtctactaaatttaaatctccgttttcaaagtactcggagttgtcttttgggaaaaaggcttgagacgttgtcacaccccatttgtacgtaccgctgtccgcttccatttcacccattaaaatcttcattaatgtggaatttgcaagttcgttgcggcctacaagagcgattttgtcatctttattcataataaagcttacgttatcaagcacttttacgccgtcaattgtttttgttagaccttcaacacgaagaacgtcatttccaatctcacgttccggagtgaagttcacgtacggatagcgacgagaagaagggcggatgtcatctaatgaaattttatcaagcaattttttacgagacgttgcttgttttgatttcgatgcatttgcgctaaagcgagcgataaaggcttgaagctctttaattttttcttcttttttcttgttcgcatctgacgccattttttgtgctaattgacttgattcataccagaaatcatagttaccaacgtagacttggattttactgaagtcaaggtcagcaatgtgcgtacatactttgtttaagaagtgacggtcatgagatacaacaatgactgtgttttcaaagttaattaagaactcttctaaccattgaattgcttgaatatccaagttattcgtaggctcatctaaaagtaatacatcaggttttccgaataaagcttgtgcaagaagcacttttactttttcactacccgttagttcagccatttttttggcgtgaagatcttcagaaatacctaatccttttaaaagaatagctgcttctgattctgcttcccaaccgtttaattcagcaaattcaccttcaagctcagctgctttcattccgtcttcatctgtgaagtctgctttcatataaatagcatctttttcttgcattacttcataaaggcgagcgtgccccataataacggttttcataacttcttgatcttcatattcgaagtggttctgttttaagacagcaaggcgttcgccagggcccatatgtacatcaccagtttgagattcaatttcaccagataaaatttttaaaaacgttgattttccagcaccgtttgcgccgattaatccataacagttaccaggcgtgaatttaatattcacatcttcaaataactttcggtcgccaaatcgtaaacttacattactaactgtaatcatgtatgagcagtcctccaaattcaatatctataaaattataccattcttttgagataagagcgatatgaatacaatatttcaaacataaagtgtaaccgacactttaagcactcgtcaaccatttaagggaatttttgagcggtgaaactttaattattctagcattcaccaaaacattgagcggcaaaccagcatgtataatccttcagtaatcagctctttttcatttttaagatggatgttgtattcctttgtataagaaacaaaaagaagaataatactacctggtaaataaaagaatttttatgaagtaaacactgatattttacgggtgcttatttctaaaattggtttgacatagacataaatagggtgattatcatgtggaaattagttgtttcctatcttccagaagggccagtttttatacaagcagttctggtttttttcatcccatatataatctacaaattattaagcgggattcgtaattcagaggaagagtgatggaagtgaaaaaatggaaatcggcagtgaaaaaaataggcaaccatgcgaacgagaaggaaaacaaacaggaatctatacaccaagattcatctaatcatgttacggatcatttagctttaactctagaagtaattaaaaatgaaattggtcataattccgatgttcattttcgtgagtttattataggacgcaccggcattcaggcagctattatttttgtagaggggctctcagataaagatcttattgaaaaacatattttgtcatcattgatggctgatttttcaaaagaatatcaacaggatcagctttacgtaaagggaagcctttcaaaaaagtgtattaaaagccaagtattatcaattagtgatgtagaagaggtccattctattaaagacgtaatatcaaaagtcttaacaggatctacggctcttttaattgacgggttatcacttgccttaattcttggtacaagcaaagtaaaaacaaggacgattgaagagcccgtatcagaagcattagtgagagggccaagagtaggcttcactgaatcgttaagtgataatacttctttattaagaggaagcggagatattgaaaatttgtcgctggtgaaatttcaagtaggaaagcgttccaaaaaagacttagttgttgcttacataaaggagattgttgatccagaactagttgaagaagtagaaaaacgaattaaaaaaattgatcttgataatgtaccggagtctggatatgttgaacaactcattgaagataattaccttagtccctttcctcaagtacagaatacggagcgtcccgatcgtgtaattgctgctttgatggaagggagagtagccattttattagacgggacgccttttgctttgattgctcccgttacgtttagcatgatgttacagtcgccggaagattattatgaaaggtggattcccggtacattcattcgttttcttcgttatattgcagtggttctttccctttttaccccggctttgtatattgcgtttatttcatttcatccagggatgattccgactaaattggctatttccattataggaacaaagtctggagtgccatttccagcccttatagaagccttattcatggaaatagctatcgaaatcttgagagaagctggactcaggttaccaaaaccaattggtccagcaatgggaattgtcggtggattaattattggagaagctgctgtgcaggcagggattgttagccctattttagtgattattgtagcgttaactgccatttcatcgtttgctattccgcaatatagcgtcgggatttcattgcgtattcttcgcttcatagctatgctatgtgctgccatacttggattatacggcgttgttttatttttcctttttatgaccagtcatttagtgaaactaaaaagttttggcgtatcttacatgagtccagcggtaccctatcgtttaagtgaatggaaagacttgatggtccgtatgcctcttatgatgatgaaaagacgtccaaagatgatgcacaccaaagattctctacgaaaaggatagcagcttatgataaaaggaagtgaatcagtggtaatgataaattcaaacgatcgtattacgacgccacaaacagctattattgtcatcaattttatacttggaactggtattctgacgttgccgcgaacagctgcggaacaagtgaaaacaccagatgtgtggttaactgttattctaggaggaatagtcactatgatagcagggataatcatggtgaagttaagccggaaattccctggaaagacgttttatcaatacagtaaagaaattacagggaaatggttgagtaagttaattagcttacttatgataggttattttttactgcttggtggttttcacgcccgttcattggcagaagtaaccggatatctcttgctggaaggaacgccgacgtgggctattattatgccatttatgtggataagcctctatttaattagaggaggcattaattcgatcgctcgactgtttgaaattatattccctattaccgttattctttttttactggtagcttttatgagtatgaaaatatttgaaatagataatctgcgcccagtacttggatcaggggtccttcctgtactaaaaggggtaaaaacaactgctcttgcatttacgggtcctgaaattatgttaatcattttagcttttatgaaagaaccacacaaagcaggaaaagctgtgctagttggaattactattcctatatttatttatgtgattactgttgtaatggttattggagcgttatcgattgatggagtagtaataagaacatggccaacgcttgatttaataaggagttttgagctgacaggcttgatttttgaacgatttgattccttgctgctagttgtatggatcatgcagatgtttgcttcttttactattaaccattacgccgcttcattaggactgtctcagcttttccaaaaaaacattcatccatttatgtatggtttgcttccggttatatatcttatttccatgattcctaaaaatattaatgatgtatttaaattgggagatgtgattggcaatatcgccttagttttatttggctttttgccgctgcttcttctcattatttcaaaagtaaagggagtaaagtatgaaacaaacctttaaccatttccagttcctattggttttgttttctgtttttttgctcttacctctggcaggctgctggagcagtcatgaaattgaagagcaaagttttggagtgggtgtggcttatgataaaggtaaggagtccatagctgaaaaagaatttgatgaacaaggaggagggtatactaaaaagaacctgattacgtcaacgtatcaacttatcactcctcaagtcgcaagttcaacgactaaacaaggaggatcgcagcaaaaatcatacgtaaatatctcggaaacaggagattctccttttcaaatgcttcgtgaattatctttaagaagtgatactcctttaactagtccccatatgaaagtaatggttatcagtgaggctcttgcacgagcgtatagtttagagcaattagtggaccaaactcttcgggacaatgattttagacctagttgccttgtgtttattagtaaaggaagggctagcgacacgttagaatcaaaaacagcaggagagatcccggcttttcacctgtatggaatgatagacaatacgtatcgaacaacgcgaattttaccgcccatgccgcttattaaattagcaagcaagattcaaactgggtctagttttctgatgcaaaatgtattatcagcaaatggagaaatcaaatttgcgggtgctggtataattaaagggaaaacaagcaaaatgattgggtttttgaatgaagaagaactagatggtttggcttggatcacaggaaaaggaaaaggtggcctagtgaaaagctttgataaaaagaccggtcagctgattgtatatgaaatagagtctatgaaaagtcacattcaaccccatgttaaaggagataatatctcttttgatgtacacattgaatcagtgggaaggctatctgaaagttggatgacctcagggagcgcttttaataatcaatttttacagaatgcgcaaaaaacttcagaaaaaaaagtaaagtacctggtaacaaacgtactagaaaaaatgcaaacaaaatataaagttgatgttgcaggtttcggaaatcaattgagaattaagcagcctagaacatggatgagggtcaaagaaaattgggatcaaacatttagtgaagtgccaattaactatgatgtgaagttaacgattaaagattatggagcatccgggtcaaaaaagtaagcacccgactgtaactttgcttatcgttatgtcaaaaatgaaaaaaacccaaaaaaataataatctcagacttcccacgaaatactcatcgcatgcttcgtacggagccttcaataaacaacaaataagagctgccgattttcgacagctcttattcgttgttattcaaaaatataagctaatgcttgaagagcctgttctggcgtttcgactacaacttgggctttgtttgccagttctttaagcgggtgatgcagtttttcagggcgaaccaaaattagcggtttatctaatgcaatggctgtcgccgcatccattgcgctgttccactgcttgtatttttcgccaaataaagcaataaccacatcagattttttaaggagcacctgcgtacgtaaattattaatttgagaagcagcttcatcttttaagacagcgttaggctgttttcctaaaatttcttctccaatgttgtcggagcggtcatggtctgtcatgggaccgacaaaggtaaggggaaggtttaattgttctgcttggtttttaatttcgtctcgccagttatcgtgaatttgcccagcaaggtatacggttaagttcattatgtagaagtcctcctctaactaaagtttgttttattttatcaaatgtaagcggataatacgaatgatttgaatgggctacttttccaaaaataaggttatagtagacaaatagttaaaaaagagaaacaatagaaggcgtattgctaattaaagaaaggatgtacatgatgacagaaacagtgctacaagtagatcatgtcagtaaagtaattgggaagaaaaccattttgcatgatgtatccttatcggttgagcgcggtgagattttcggattgcttggtccaaacggctctggaaaaacaacgttaattcgtaccgtcgtaggactcatcaaagaaacagagggaacaattatcgtcaatggatttcctttaaaagaacagtttacatcagctatgaaatcaattggagcgattattgaaaaccctgagttttatgattatctgacgggctatcaaaatttaaaacactttgcgaatatgcatgaagggatcacatcagaacgcttggatgaagtgattgctttagtaaagcttgaaaacagcattcatgcaaaagtgaagacgtattctcttgggatgagacagcgtttaggagtagctcaagccattttacataagcctgcattgcttttactagacgaaccaacaaatggtctagacccagcgggaatgagagaatttcgtacatatttacaaacgctttgcagggaagaaggaatttcaatcttaatcgcgagccacttattaaaagaggtagaagcattatgtgaccgcgttggcattattcaagacggtgagttaaaagccattcaagatctatctccaaatcgtcaagaccaaggaatgtacgtagaatttgagttgtctgacgcgcaaaaagcagcggatcttttatcacaagaatttgaagtaacgatgagatcacatattatcgacgtggcgattgtaaaagaacaaattccagctgtaaatagaaaattagtggacagcgatattttagtctaccgaatcactcctgtgtatgagacgcttgaagattcgtttatgtccgttacggaaggagagcaccatgcttaagctaattcaaaatgaacatatgaaatggtttcacaaaagaagcacaaaagtcacgtttattaccatcggtattttaactctttgtatggctctattaatgaaaaaagtagcaaacagtgcaggaacagaagacaacattttgaacttcctgtcatttagttcaggtatgctgattctcattcaatttttcgctcttgctgttggagggtcaatggttgcaaaagagtttgaagcaggcactattaagcttcttttaattcgccctgctagacgttcaacgattttagcatccaagtacctaaccctcattttaattagcttgtattatttactgagctatttgcttttttcgtttgtatggggagccttgttctttggatttaccagtctagaaggagatgcgcagctgcttaaaaatattacgcttacgtatgacagtgcgtatatggaaacgtttatgatgatgacgttcgcattcatgctgtcgtctttatttagaaacagcgcgcttgcttccagtctggctattgtcgtaagtatcggggcgaaagctgtaacaggactagtatcacagtttggtttatggtgggggaaatttttactgttcgccaacacgaactttgtgcagtatatggacggaatgaagacgatgtttgacggcatgacaattccattttccattttcatcttggtggcgcattttgtcttctttatgggcgtggcatgggcagcgtttttgaaacgagacgtagctaattgatgtgagaattttcgcactatatatttttctaaaatagcatttgacaattaaataaaaagagcttacagtagtgaaagactatttttaaaacaactataaacttcttatcaagagagacggagggactggccctatgatgtctcggcaactggctgtacgcagtgcggtgccaaatccagcagacgatgtttcgtttggaagatgagaagggtaatcttatgatacaaataagagacctcttcttatcaataagaagaggtctttttttattacgtaaacaagaggtgttaagaatggaacaacaaaaaggaaacggctgggcgctgttaccgctgggcgtctttttagtcctgtttgtcggatcaggaattataacgggagatttttataagctgcctgtattagtagccattatcattgcagccattgtggcgctggctatgaaccgcaaagattcacttaatctaaaagtggaacgttttgctaaaggagcaggacatcctgatatcattattatggtgcttatttttattttagcaggtgctttttctcaagtggctaaaggcatgggagctgttgattcaacggtaaacttagctctgtctgtgcttccgcaaagcttagtggtagtcggaatctttattattggcgcattcatttcaatttcgatgggaacgtcaatgggaacaatcgcagcgctagggcctatcgctgtagggatcagtgagcaagcacatgtatccattacattggcaattgctgccgttgttggtggtgcaatgtttggagataatttatccgtaatctctgatacgactattgcagcagttcgtacgcaaaaaacaaatatgtcagataaattaaaagtgaacttttttattgtacttcctgcagcgattgttacggtaattttattgcttgtaatgacgctaggcaacacgtcatcagtagaaattaaagacttcagctggtttaaaatcttaccttatgtgggcgtcttagtcgctgcgatatttggtgcaaacgtattaagtattttaaccggaggaattgtattggccggcgtgatcggattagctgacggaagctacacgctttcttctcttgctaaaactgtgacagaaggtattggcggaatgtcagagttaattattttatctctgctaatcggcggaatggttgagcttattcgctataatggcggtattcagttcttattgaacttattaacacgacgtatccaaacgaaaaaaggcggagaattcagcatcgctggactggtaagtttaacaaatttagcaacggctaataacacgatttcaattattacggcaggtccgttagcaaaagaaatctctgataagtattcaattgataatcgtaaatcagccagtctgcttgacttgttttcatgcagcgttcaagggcttatcccttacggcgcacaaatgcttctcgcagcaggatttgctaaagtttcaccgattgagattattccatttacattctacccaatgttaacagcggtttgcggaatcattgcaattgtaattggatttcctcgtttaaataaaaagtcaaagtcatctaaagaagctgcgtaatatcaaacccttaaaaagaatgttctttttaagggttttttactgtttaaaaaaatcagtcggcttttcatcatctaactccttccaaagcgtctcgttctgcttaagtgcataagccgctcctccaatttcaattccgcataataaaatgaataataaaatacccatgaaatgacctccttacgtaaatgagtaaaaacacgatggtaacgggtttagcttcttgctgtttcactttataatgagaataaagtatgaaacgcgtttcagcgcaagagaaaaaggtgaaaacatgacaaatatccgagatatcgcaaaaaaagctggtgtatctgtttcgactgtatcccgggtgctaaatcatcatccgtatgtaaaagaagaaaaacgccggctggtagagcaggttattcacgaacttaattatgaacaaaacattaatgccgttcacttatcaaaagggaaaacaaatatgattgccgtcgtcttgccttttattaatcatccgtattttagtctgcttttagaaggagtggcatctcaggcgttagaaaagcagtatcagcttgttatttgtcagacgaactatgatgtgaaaaaagaagaagaagcgcttcatatgctaaaaacaaagcaagttgatggagtgattatttgttctagagcaagcagctggagcacgattgaatattatcagcagtacggtccgatagccgtgtgcgaaaacgtacagaatcgttctattcgctccgtatacgttgatcattatgcagcttttaagcaggcgctcctgtatttaaaagaaaaaggatatacggatattggctactgtattggaagaatgacgggtacgaatagtcaacagcggcaacaagcatacaaagaatatgtagaaagaataaatcagccttatcatccggaatgggtttttcaaggctgtttgaacgtgacagatggtgaaaaagtggttgaaaaactagtgcagatgaaaaatcggcctcaggcgcttttagtaacaaacgatcaagtcgctatcggaataaaagctcagtgcgaacaagcgggtatttcagttcctggtgaattagctatcattggttttgataatcatccgctttcttcttatttacaaataacaacgatcgaacttcctcttaaggaaatgggagaaacgctttttacattagtgggaagcaaggttcctcagaaaattgagctcccttttcggtttattgagcgtaaaagcgtatgaattcttgatgatgctatgagggtttttaccggataaaatgagtaaaagcggacatcatacgagtaaagaaagaagaaaaggatgatgatcgtggagaaaaaagaatatcaagtgggagatcaagtatttgttatttaccgaaatcctcatacggcaaacgttgcgaatattaatcaggctgaaattgttgaacatcctgaaaataaaggtgaaaaggcgctgtttctgcatgagtcttatcatttgttagctgaagatgatgccgtgtattcaacgtatgaagaagctgaaaaaatgtataataagatatttgattatgaacaatatgactgacgcaaggctctcttaaacagagagtcttttttgtttgaaaaataattaccaaggatagagtctttttatttttcaaacgctattagtattagaaaaaaggaagtgtacatgatgataaaaccttttgtacctcaattagtatatattgagccaggggcaatggagtacccgcttggtgttcaattaaaagaaaaatttgagaagatgggaattgagattcgtcaaacaacttctcataatcaagtccgtaatataccgggaaaaaatgatttgcaaaaataccgcaatgccaagtcgactttagtagttggcgtgcgtaaaacattgaaatttgatacatctaaaccgtcagctgaatatgcaataccatttgcaacagggtgtatggggcactgtcactattgttatttacagacaacaatgggaagcaaaccatatattcgtacgtacgtgaatgttgaagaaatattaggtcaagcagagcaatatatgcaggagagagcccctcaaataacgcgatttgaagcggcttgtacctctgatatcgtaggaattgaccatttaacacattcattaaagcgcgcgattgaatattttggggaaagtgaactaggtcaactgcgctttgtgactaaatttcatcacgtggatcatttattggatgctaaacataatggccgcacgcgctttcgctttagcataaacgcggattatgttataaaaaactttgaacccggtacatcccctcttgattaccggattgaggctgctaataaagttgcaaaagccggatatccacttggctttattgtggcgcctatttacattcatgaaggttggcaggaagggtatcgtcagttgtttgaaaagcttgatgcttctatacctgaagagtcaagagatgatattacatttgaaatgattcagcatcgctttaccaagccggccaagcgggtaatcgagaaaaactatccgaaaacaaagcttgagatgaatgaagaagagcgccgctacaagtgggggcgttacggaattggaaagtatgtatacgcaaaagatgaagaacaagaattaagagagacgttggaatattacattgatcagtattttccaaatgcaaaaatcgagtactttacgtaattattctacagtaattgaaaagttattttgacatcttagtcgagatagctttttaatttttaacgtaaaaaataaattggttgctaataagctgaaaaaagaggttatttgtatctcttgtcgtattacatacataagggaggtgactgagatgttaaaaaatgaagagtttgcgctaacaaaagaattaacaaaagaacagcaagaagctgcacgaaactttattcaagtgttgtttcaagaagatttatctgaattttggaacatattatgtgatatcgataagtctcgtatttacggcttgtatgaagcaaaccattattatgattctgatattgaactgcatggatttgtacaagaaataagagataatgtaagagctgtgtatgcgcctcttcaagggcaagggggcatttcgacgaaggttcgatatacaagcgaaggaaagatgtatgtatacatattaggaagtggcgaaaaccctaaggtatatcctgttggattaatgcctgaaacatatatcgaacaagaacgtttttctcagcggcttcaaattagtatttataacgacgagtttcgaaacgttgccctataaaccatatacatgggaaaataaagaataataaaattaatttgttaaaatagcaatatttggggtatgtaatagatataacattaaaaaggggtgaaagaaatgcattattatcgtatttcagagggagaccatgaagagtattgtgaaacgattctgcttcatgaaaagaagttttgcaaagaaacatttcaatctatggtgcgagaagcaatgaacaataagcccggtaaaattgaccgtgtggatattgttaaatatttaattggtcaccatagttttcaagtagcccacatcgaagcgggatttcatagtacatacagcgagaaagtgacataaaaaatgcagcacctcctatacaacgaacttttcttttgaaaagggcgctgtatttttttttgctaaaaatagaatgtttctaagtgatatcccttttaatggtataatagttaagttctgttagatatacatataaacatcacaaatactttaaagagaaagggtgagagaaaatggaaaaagaaagaatagaagaacttgaacgaaaaataagcagtttagaagaagacgtagccaagctaaagtcgctcgtatataaaacaaattctccaagaccagcagttcacgctcctcccaagcagcgccaggagacgactaaacgtcctgctcaaacagcagctaaaagctcacaggcaatagaagagcctgttgattgggaaaaagttctttttcaaacatggctgccgagaatttttatttttgtatttatcattggcgtgctatggggatttaaagcagcctctgactatgggttaatgaatgaaaaagcaaaagttgttctcggctttgtgctttcgataggttttgctgtgacaggtcattttcaaattaaaaagagcaggctggtgctcgggcaagtacttgtaggaggagctattcctattctcatgttaacgacgtttgccatgcatagcctataccatttagcaggaccaacgctggcttttatgctaaatgcgacttggatcatcttaggaattgcagcaacagtcttttatcgttcgcaggcgctaggtattattagcgccgtgggaggcgtactagttccgtttcttattgaaagtaattcgcctaatgcgcttgttttcatcggctatgaaacgtttctgtatatagcctttttatatgtggcagtcaaacaaaaatattctattttatatgtactttcggcggtactattaaatcttaccctactgatttactattcgtttgttggtgataatgatgtaaaagggttattaggtgtggcgattcttattcagcatttatgcttactttctagtttttttctatcaaagtccgtactgcaaatatatgcgtttacccttttatcgagtttggcagttacgtacggctggctgctcgccgtttttgacgatggtacgactacactggtgctgcttgcgttagttattatttacgtattaggtgcttacgcagttagaagttctaaagagaaatttgaattttttatcacctatttaattgttgcagtagcgttttttattcatcagctcgtcgatttaagagaaggagtgattttatatgtgattcaagggcttgcagtttactatatcgccatgacgtacaaaaatcttcttcatcaactgttttcttatacgatttatatactgagcgcaacgtatatcttagttacaccaatcgaacaagtgctgtctcttccgacattaaattggcttgttgtgttagcatctattctagtatttatatggatcagcattcaaaaaacagaaaaagatgagcatgatacgttcaaaattggaggaagtattgttttttctattctttctttaatttttgcaacggaagtgacggtcgctggaaccactgatctttccgctaatacacaaacgcttattatgacggccgtttggctagtgctgtccattactgcattcattataggagcacttaaaacgtttaaaacagcaacgtatgtcggcgtgggcattttgttcttaacactttttaaactcgttttatatgatttaccttttatcccaatggctataagggccttgttatttatcgtcttaggagctatcggtctaattatttcacgcctattttataaaaagaagtagctagaagctgaagagaaattcttcagctttatttattataatcttgttatgtaaacttaatcctgaagtcgtacaaaaggtatacaatcatgtataatggaacaagtgaattggaggtatacataaaatgaaatcacttgtattagcagaaaagccaagtgtagcacgtgatcttgcgcgcgtacttggcagcacacaaacaaaaaaagggtatattgaagggccaaagtatgtcgtaacatgggcacttggtcatttagttgaattacaaacaccagaggattatgataaccaatataaaacatggcgattagaagatctgccaatcatgcctgagaaaatgaaattgaaagtaattcgtaaagtgagctctcagtttcgcacagtatccgatctagcaaaaagaaaggatattggagagttaattattgcgactgatgccgggcgtgaaggagagcttgtagcccgctggattatggaaaaggtacgctggaacaagccgtttaaacgcctttggatttcgtctcaaacggataaagcaattcgtgatgggtttaaacagttaaaaccaggaaaagagtttaaccgcttgtatgactcagcggtttgccgttcagaagctgattggcttatcggtttaaacgtaacgagagcgttaacgactaaatacgaagaaccattatcggcaggaagggtccaaacaccgacccttgcgatgataattgagcgtgaacaggtaatcaatacattcaaacctagtgaatattggacgcttacagctcagttttcatcttttgaagcagcttggcaaaagggcaatgaaaagcgcatttttgatgaaaaacgcgcaaaagagctgcactcaaaattatcaggcgaagcagttgtaaaaacaattaagcgcaaaatgcataaagaagcgcagccgcttccttatgacttaaacgaactgcagcgggatgctaacaaacgctttaatttctctgctaagaagacattaaatgtacttcaaaagctatatgaacagcataagttagtcacatatccacgtactgattcccgttatttaacaacagatatggtttctactatgaaagagcgtttggaaagcatctctgctgtatataaagaagaggttcgtccaattttaagaaatgcacagctgccaaagcgagtggttaataacgaaaaagtaagtgatcaccatgctattatcgtgacagatcagcctgtgtttttacaggacctatcagctgatgaacgaaagctgtatgacttaattgcaaagcgatttatttcattattttatcctgcatatgagtatgaagtggttaaagcagagcttgaagtaaacggggaacagttagtagcaagcggaaagcaagtcgtgaatgcaggcttcaaaaaagtttctagtggagactcagaagcaacggtgaagctgcctgatatggaagaaggcagcaagctgcttattcaagatgtaacgatgaaaagtgcatttacagagccgccgcagcgctatacagaagcggatcttcttggacaaatggaaaaacataatttaggtaccccggcaacacgtgcagatattattgaaaaacttctgcagaatgaatccattgatcgccaaaacaatcgtctgcacgcaaccaaaaaagggaagcagctgattgacctagtagcagatgagttaaagtcgcctgagcttacggctaagtgggaacgtgacttagaagcaattgctaaaggaaaaggaaatgcaaaagagttcttaacaaatattcgcgaacaaacagaaaagctagttaagcaagtcaaaacaagtaatcaaacgtacaaacctcataatttaacgggctctaaatgtccggaatgcggttctttcttgaaagaaaagaaaacaaagcaaggaagggtgctcgtttgttcaagtcttgagtgcagctatagacgcgcaaaagaccctaaactatcaaatcgacgctgcccacagtgtcataagcgaatggaaattcactcaggaaaagcgggtacgtacttccaatgtcgttcatgtcaagtagtggagaaagctgaggacaaaaagaaaaagatttcgaaacgagaagaacgaaagcttcttaacaaatacaatgatgacggagcatttggttcaagcttgggtgatgctttaaaacaagcccttcaagataaaaaagataaataatgtagaaaagtgcgataccacggtatcgcacttttttcgtataatatggattaagtgatgagtaagtaaggtggagtggaacaatgaaaagaaaaagcaggggaatggatcgtttaatcgcgttcattatagtaggagcgatggtactaatcattttagcgatactaatggtaagctatttttttggttttataggcttccttaaagtaatgggagtggaatatgagtcctactgggccatatgtttatttctatttttaatttttgtatttggctctatcacagagcttttttcaaaggtactcatttttttaatgaagaatgccagactgaatagagtactatttataacatctgcagcttttgtggatatattttttacttttctatcagtttatatagcagacttgcttgtgagcggcatcactgtatctattttagcggtgactcttttatccgtcttattttttttgatggagagtgcattggatagtgaatttctacgtaaaaaaacaagctgatgaagtttctcatcagcagcgcatcagcaagaaaagcgcatcatatcaagcttcaacgttatttaaaggaccctgtaacatatttttttaaaaaagtatgtgatttttttcacatatctcttgaaaaaggacaaacatgtttgtataataagaattgtaaaagatatgtgaaacatttcacaatatatgtgaaaaacttcacaatatcatattttctataatcctaagggggatatcatctatgaaaattgcagtagtagggtgtacacatgcaggaacggcagcagtaaaaaatatggcagaactttatccagaagctaaaattacagtttatgagcgaaatgataatgtttcatttttgtcttgtggaattgcgctctatgtaggcggggtcgtaaaagatgcaaatggcttattttactcttcaccgtctgaattgcaagagatgggtgtaaatatgaaaatgaaacatgaagttacgaatattgatacagatggtaaaaaaatagctgtacgaaatttagaaaccaacaaagaatttgaagatacatttgacaaactagtgatgacaactggatcatggccgattattccaaaccttgaaggcatcgatttaaataatgttgtgctttgtaaaaactatcagcatgctaatcacatcattgaaaaagcgaagcaagcgaagaaaatagccgtaattggtgcgggctatattggtgcagagttagtagaagcattcgaagtgtatggaaaagaagtgacgtttattgatagtgctgatcgcattttaaataaatatcttgatccagaatttacgaatttaatggaaactgagtttgaaaatcgaggagttaaattagcattaaaccaagcggttactaaatttgtaggcagcgagggatctgttgaaaaagtaatgacaactgatggcgaatacgaagcggatcttgttattctgtgtgttggattccgtccaaatacagacttagtaaaaggacaagtagatatgcttccaaacggcgcaattgtggttgatgaatatatgcaaacaagcaaaaaagatatatttgctgccggagatagctgtgccatttactacaatccgattaagaaacatgcctatattccgcttgctaccaatgcggttagaatgggaacattagtagctcaaaaccttgttaagccaacgattaagtacatgggaacacaaggaacgtcaggcttgcatatttatgattacaatgttgcatctaccggcataacagaaacagcagcttctctttttgatatgaatgtgaaaagtatcacaatatcagagaataaccgacctgaattcatgccaacgtacgaaaatattacgttaaaagtagtatatgaagaagaaacaagacgaattgtaggcgcacaggttatttctaaaattgatgctactcaagcaatcaatacattgtctgtatgtgtacagcaggaaatgacgatcgatgagcttggctttatggactttttctttcagccgcattttaataagccttggcatttcttaaaccaagcaggacttcaagcgcttcaagcataaaaaaagcaggtgactacctgctttttttatgtggattttattatttttttattttagcaggtctaaagcggatccagcctatagtaaggagaataaaaggataaaaagctcctacgaaaaaactatagggaatccacgtttcggctaaccatgttttttgatagaaaatgcttggctaaacaataatggaaaaagtcataacgattaatcccatcggtaacgttaaaaaacggatttcagcaatgttaaaaatttgacacactccagcgatggaagcatgaaaataattagtgttatattttcctggaaaataattacttatactgaaggtgcattctttatgaaaggtttttggatttctatccattgctagaacgccgctttttattttgaataaacccggcaattaaaaggaaaagtggatataagatgcctacaagtaagctgtagggaatccacgtttttgtatcccaatccttttgataagaaacgcttggatacacaataagggaaagggtaatcataatgaacgcgactggaaaagaaaatagcgtgtagtcctttatatgaaatacattggcaaaccccaaaagagtagcgtaaaagtaaatgcaaagcttaaaaaagagagtaataaaccacaaaatagcaatgactacttcaattccttgaagaaagtttcctacatcaattcttcttcctaattcatagcttggaaacatggtgatttgggagtaataaggaccaagtactagaattccgagtaagattaacgtcaccatcactagtccaccggctatattacctacataaaaagattgagttgcctttttcatgtctggcgtgtgtgaagggaaaatcataagcagaatggtataagtcaaagaactcatgcttaaaaacgttaaaacagcacgaataaaagcttttggatggatttccaacacaggctgaatatgctctattttaatttgagggatcatagacaaaataagaaggccgaataatctgacaaaccaaggaaataaaatctcggcacttcgtgcaatcacttctattcctaggcgtactcctacgatgacgacacccataaatgcaatgtggatggctgttagcggcgtgtagggaaggatttgagtggtaagaaaatttcctacatagtaaagaacttgactgctgataaataaattagataacacaaaaacagcagaaacaatctttccaaatagtttgcctaaaattttttcgttcatttccatcagcgtaagcgtgggaaacatttttcctagtgaggtaaaaagcaaaactaagccaattcctgatgctacgccgaagagtgatgcaatccaggcatcttgatgagcatcagctgtaatagcggcaggtacaacaataattgtgcttccgatgctatataaagttactaatttgcgaaactgcgcagctgaaatattgatttcattaagcaaaatgagcacatccttttgccatatacatgaattaagtgatccaacggaataataagtgacttaaaggttgaaacattacttctacccaatcagaagggttcggtaaaggcagccgaaagatttttgcaagagcgattatgatactgattgtcatgaataccataaaaatgttccgttcctttttatgagagtgttgaggtaatctttttgtttccatccatataatccctgcacaaatgatcaaaaagaaaagaaacaagtgcatgcagtcaaccccaatacattttttcgttcagataagctattcgtatgatgtctgctaaagaaagtgattatacatttttgtaagatatagaaagcatttcaggagatagaagatattttttagggctcttatatgattgagggatttgttatgaggaatattcatttagctttaacctattgaagcgtcgtatgaataagtagaaaaatgccacactaaagagtgaacaaatggaaaggagcactatgatgaaaaaatacccatacaataaagataaacaacaatcgtttcaagcagcgcagcaggggcataaagaagcagtagatgcatatgaacaggcaaatgaagctaaaaatgatgcatcgtacggccatgaagcgaagcaagcaataggtgaagtgaatgaagcctctcagcaaattgagaatgcgcttgaaaatgcttctgaaacacagcgtcagcgtttaacagagtttcagcaagatataaaagatatggagaacgatcttaatcaataaaagagccgctgttttacttaggcaggttcacaatagagagtataaattgtaaaagcagaaggtaatgaacttctgctttttttgtcgtataagcagtatttacgctcattttttaatctaaatgaaggctaaataaatttctacccatacatatacatattttgggacattaagggtatagagtagtaatttaattaaggaggatgattatgaaagcagtaacttttcaaggtgcaaaggatatccaagtaaaagaagtagaagatccatctttgaagaaaaaagacgacattattgttaggattacatctacagctatttgcggttcggacttacatatctaccaaggtgctctccctgctgaaaaaggatacgttattggtcatgaaccaatggggattgtagaagaagtgggtccagaggtaacaaaagtaaaaaaaggagacagagtagttttaccgttcaatatttcgtgcgggacctgttattattgtcagcatgatttagaaagtcaatgtgataactctaatcctaataaggaaatcgatacaggaggatacttcgggttcactgaacgatacgggaatcacccaggaggacaggctgaactattacgtgttccctttgggaattttatgccatttgtaattccgccctcctgtgagcttgaagatgaggcattgttatttatgtctgatgttctgccaaccgcttattggagtgtagaaaattccggagttggacctggggatacagtagtggttcttggcagcggccccattggattaatgactcaaaagtttgcatggatgaaaggtgctaaacgggtcatcgctgttgataacgttccatatagattaaaacgagctaaacaaatgaataacgtagagtgctttaattttgataaatacgacgatatgggaagctatattaaagaggtaaccggtggtggagcagatgttgtaattgactgtgtaggaatggatggaaagaaatcaccagtagaagcgattgaacagaaactcaagctgcaaggaggaacgttaagtgctattcaaattgcactaaaagcagtaaggaaatttggcacaattcagctaacaggtgtatatggatcaatatataatatgtttcctcttgggaacatttttgaaagaaacatcactttaaaaatgggacaggctccagtaattcattacatgccagaattattcaaaaaaattacagatagggagtttgatcctacagaaataatttctcataaaatccctcttgatcaagcgagtgaagcttatgaaatgtttaacaatcatcaggatgaatgtacaaaagttatcttaaaaccataatcaagcatatatctccttaaatatgtataaagaaaaaattgagaattatttttacaataatcatatctatttgaaagaggctggaacaaaagcatgttatttgaaggaagatccgagcacgtttgattcttgatggagaatcgaatgcgttcggatttttttattgatagtgtaaacgtaagtttcgtgtatataattgcttctagctgttgtttgggaggaaaggcgaagacttgcacggaaatcaacagtggtgtaacaaataatccatcattccattcttattttaaaaggtatagaagttaaaaaagtaagaatcctaataaaaacagaacgataagaatggaaagggattgtgacaggaaatatgctaataaacatactaataatgattgtcgtattgtacttcatatatgtattcgcaactgcagtggtactgttttatgtccctttgcataagggaaaagacctaaaagtaatgaatactgagaatttttacgggaagaaagaatccacagatcgagttatgcttttggaaaacggttatctttcagggcttgttcggatgcagatgattcaagaagcgaggcatacaattgatattgcttacttttccataggtaaaggtcgttcttcggatttacttatgggcgctttattcgaagctgcggatcgaggtatacgtattcgcgtgctgttagacgggatctctcatgggttaaaaggcaagagaaaaaatgttctttatgctctagctttccacaataatatagaattaaagtactatgagcccttcactatttttaaaccttggacatggcataaccgtcttcacgataaaataatagtagtcgatggtcaattaggtattagtggaggacgaaacattggagataaatacttggccagtcaaccagataaaaattttgtctatgaccgtgatgtgctaatttataacacaaagcaagaaagttatagtgtcattgtctcaatggagaagtatgtagagaaattatggaaccacccgtatacccgcaaagcttttccaaagctcaagaaaactaaacaatttcggggcctttcaggcaagaaattgttaatagatcaatacgaagaggcaaaaaaagcaaatgaaccttttgtccatccttatattgtatggagagaagcaacgatgcctacaagaaaggtttcttttattacaaatcctattcaacgaatgaataaaagcccttttatatggaaaacatttattaagctttcccaacaagctgaaaaatccattgttgttcaaagcccttatatcgtaccaacaaaagagatggaacagtatatagataagcaagtaaaaccaaaagtgcaaagaattattttaactaattctattacatccactccaaatgctatggctttttctgcatacttgggagtgaagaatcgcgttataaaagctggttcaaagctttatgaatatcaaaagccttattcaattcacgggaaatctgttgtttatgatcagcgtttaagtgcagttggttcttttaacttagattcacgttcagtatttttaaatactgaatccatggttatgatagatagtgaagaatttgcagccgagctaacaggagctattgaaactaaaatttctcacagtgcgcttgtaggaaatgagggagaacctgttgatcttaatacggattctcaaaaaaatgtccctcctgtaaagtctgcactcctacatatcctttcggtcttcacgcgattttggagacattttgtatagttccgcactgtgtctaaaaaaggcttttactgaaaatcaatggtagaattaagagctactgcaactggcggaggggagtataaaaagctgtgatatgcctcacagttttttgaaatcgctagtactagtcatgattcttaaaaagccctattgacgaaattttatatatgttttattataatatagcgtcgttaataaatgaggttcttttgaagaaatgatttctaggggcatagtttaaaggtagaactacggtctccaaaaccgtcagtgtgggttcgattcctactgcccctgccattttggagttatcttttaattcacacgcgggtgtggcggaattggcagacgcgctagacttaggatctagtgtcttatgacgtgggggttcaagtcccttcacccgcatctttactttcatatacgcgcggaagtagttcagtggtagaacaccaccttgccaaggtgggggtcgcgagttcgaacctcgtcttccgcttcttttcaaaagcagtttgcatgtgcaaactgctttttttgttgtagaaataaagagttttattatgctgtttttaatcagaaatagtttagtaaagcagtgctgcttatacgtgttgttttcgtgaatatacacataatattggggttacattaaaagctaatgaacgatacgtgaagacatctaatatggtctttaagataggggagagtcctatggaatctagttggttttcaattataccgtttttaattgttattccaatagctattttcaccaaacaagtgctgccagggttgtttctaggcttattagtaggcgcttatttgattgatcattcgattgtcggaggtgttgaaaagctacttcactacattgtacaagctcttagaaataaaagtaatatagaaatcgtcgtctttttatacgcattttcagggcttatcggaatgattaagatggctggaggagtgaagggttttgtagaaacagctgcagaaagaattgatacaagaaaaaaagctcttattttaacctatgtttcaaccattggaacattcagtgctcccacatttcgttttgtgacgatcgcgcccattatgagagcattactcaaaaaggtgaaaatgacgacagcagagctagggtttgttattgaaacaactgctactcctgttatcgtcttaattcctgtggcaacggcatttgtagggtatatggtctcaatcattcaaatggcaattgatcatcaaggcataaaacaagacgcttattctttgtttattcaaagcattccttataacttcttttcgattgtgattattttagtagggatttatttcagcttttttcatcattcaacatctacggctcctatgaagctcgaggaagaagacgaaaaagattggcatgattgtcatccttgcgtgtcgaaggatttgccttctaagccttggaatttgttagtacctttacttgttgtgatttcacttaccttacttttaacatggtggagcgggcatcataagagccacagcttttttgaagcatttattaaagcagacgtgttagaagcgatggtagtagctttaattatcactacgttaattaccctcatttttttcttgtttcagcgctttacattacagaatttgcttaatggttttatcacaggaggcaatgacttaatgtccgttattctgctgttatcggtagtatggggattatccgctgttacagaagacttaggtttttcaaattttgtgacggcacattctaagtggattcctcaaatgtttgtcactccgttcatgtttatctttggagccgctatttcttactttatcggatctgcttggggaacgtgggggatcttaatgccgcttggcatatcgcttgcaagttctgcagatctttctttgccattgattatcggtgcggtgtttgcgagcggttcatttggagcgttttcttcacctttaagcgacgatacgaataccatcgccaaaatattagatttgtcggttattgaatatgccaagtataaattaaagccagctttaattgcagcgggaataacagtagctttttatcttgttgtatctttcttgttttgaatgagggaaatagccatctagtatcaatttttcatttttttcagcttaaagtatgcatacagtcctaatgataggcacactagcatgatacaagtaagcggaaataagatggtattaacaaaatgatcataaaaccatatatacaaaaaaatcacctcgataaattaagccatttttctatttattagagatacacgatctgtgttgcttcttcctatttttcaaaaaggcgatattcagaagcagtatgggtacgatagaaaatagcggcatatataaaagaaatctcgctacgtgtaaccctttataaagatgttcttaaaaattactagcgatggtaatcgacaaaagcaacacaatgatgcgtaaaggatacgctagttgtgaaggagatttaattttaaataaagtagctgtacctattaataaaggtaaggttctcaggcagcagattcttaagagaagactatgtttgttcactgcttgtttgatttgcctgaggtcgaagattatttttagatttttgatttttaaagaacgaaggcataaatgaaagcacccttactatatactatagtttttattaatttgaccaaaaccgtatagttatataatttttaacaaaatatcttttgcatggcagtaaataaaaatgacgaacctatgaggtaagcaataattaggtgaagagtgaaaatgatgaagttattggagtcagcctgctgctatttggatcactgctcgctctttctgtaggaattgatctttttcaaggaacgaacgtactgcaggcactataccatgctttaagcccgttttgtgtaaatggaagtggccgaattatttgtccttttttctcttttgtttttctttttcgcggagtcactttatcttgttttaaagaagcgtcagcaaaagcaatagtaacttggtgcaaagaggtttttatctcttcactatcgaaacaagcgtatagaaagatagctttgagataggggagaaccacatgaacattgagactaacaggttattaatacgcaaatttaactatgaagattggcaggaggtctacgcatatacatctgatgctaatgtcatgaagtacataccagaaggtgtttttagtaaggatgatgcgaagaaatttgtaaatgaaaatatgaaaggaaacgttaaaaactttccagttgtattaaaaaatgaaaacatcataattggtcatatcgtcttttttaactattttggggaccatacttatgaaattggctgggtatttaatgctctctatcatcagaaaggatatgcttcagaagcggcaaaagcaatagtggactatggttttaacacaatgaaactgcatcggattattgctacttgtcaaccagagaatacgtcttcttatcgtgttatggagaagatcgggatgagaagagaaggttattttaaaaaatgtattccaactgataaaggatggtgggatgaatattattacgcgattttaaaagaagagtggaaatgagctttgcttttacggaattgcattttccaagttgtaaagacgaaaacaagcccaattttaaaaaaatgagcagaacagcaaaccaaaacgtctaggcagacatacaataagctatccatgagaaacaccccatgtttgaaccttctttgttttagcaacagaaaattacgttgaaagggagtgcttgtatgtctaatgctggatgtggatttggttctggtttcgctttattagttgtattatttattctattagtaattatcggatgtagttgttatagcggtggttatggtggcggatacggctgctaattatatcactgaatagcctaaaggataccctttaggcttttttgtgttcattataaaaagctggaagagatgattaatcagcaggctcagtatcaacatgcgattcaattttcttctctttcggcaattggtcaatagaagcccaaggcacgcggcgaggcttatattcaatcgcatcagtagagtaaacggccacgcttacgactcctccgtgtacctgcgctcgaatcaacaaaggatcactatacgtatttttaaagtgaaagtcaggtccataccagctgacggtagcgtctcgtccaggaggtacgtaggaaacgctacggctgtgtgaataacgctgtgtaatcgttacgccagcgttatcaacggcgttaaataaagtagaagaaacttggcaaattcctcctccaactccttcagaatactctccttttacaatgattggcgcacgcatatacccttttgctgccgttctttttccaacggtttgattaaaagagaaaacttccccaggaaatataacgctgctgtctagtgattcagccgcaagagaaatattgtgagaacgatttttattatgagggttaaatactgtatgataatgaccgatttgcttaattcgaatcgttgcaagcagctccttatctacgcgaggcggaacaggaagcgtcgggatttctaatgttgacgtaccgccgttaaaaaaataagtataaaatttctccgcaaaatctttatgatatagtttgacacccgcttgctcaggaacaatttgtccgcttttatcaatgcgggcatttatgggctctctatatgtctttttatccaattcttttagaagaagattgtatcgatcatgatcaaccataggtacaggaagaagaggtacggtcactttgtcccgttcaatccgttcaattggtttaccgtcatgagtaatagataggtggtcttgtgtagaaagaggttgaatgagcattaaaagtccaaccatccaagtgaaattcatatcatatacctcgctttcacctgttagtatgaataaaatgaaccgtttaatgtataggattcacaagctcttttttgtattattttccattagcttagcgtgtaaaaatttctatttataattgtatgtgtactttcgcatattacatagagaaactacaaggtaatgagggtagacaatgacaaaattaatgattttagtctttatgcttattagtttttttgtgcatccccaaaagatgaaagcagaagaaaaccttacgtactttccggtaagtgacactggaaaagtattaaagtggaaacgtgtagaaagcttactgccgaaggggaaaaaatttaaagttatcgatgtagaaacgggtttttacttttacgtgcagcgaagagcaggctcacaccatgcagatgttcagccgcttacacgtcaagatacgaaagtaatgaagcacttatataatggaaaatggagctggaaccgaagagctgttctcattccgtttaaaggtcaaatgcttgcagcttccatgaacggaatgcctcacggagccggtgcgcttgacaatgggttccccggtcatttttgcattcattttgcaggaagtacgactcacaagtctcaaaatgtggatccaggtcatcagttaatggtattaaaagcaggaggaaagcttgatgaatatgcattaaaagctgagccggcagaagtcgtaaatatgtttttaacaggattaaagcaagatgacgatgccttaatgcagccggttttgcgcgtgaagcaagagcataagctatgggcaaaactgcatagtatctccactatttattataaaacggacttatttcatacaaaaaagtataaaacaaaagaaaaaatcgtcgtagattgccttatttattacgaagataaaggggctcaaaagacaacgatggtctttactttaaagagaaatccgttaacaaatgggtgggaaatttcttctcttacattgtaaatactgattaatgcttaaaaacacatctgacaaaaaacagatgtgtttttaagcatttgtttagctctttagccgttcgcaatgttatagtggaaaaacgtgcttacatacgatagaaaagaataaaaaagggtataagtaataatattactctttctacaaagaactctacagcacgaaaggagagggtgtttattctttcatattggtttagccgcttagtcgctgcagaccctggacgaaaaaggttcaaaacggcttctaaagctacgattagcgtcattacagcggttgttattatgctgatcgtattaaaagcagcggggagctcacaaattaccgctgctattttagcaggcgtaattggcctgatgggtatattggttgtgaatgatgaaacaacaaaagcaaaaaaagtgacaacaggcttagtagcactttctagcgccgtttctctcggaattggctcgtttttatcacgatatggacaggcagaaaatgtttttctcgttctgctagtgtttttgtccttttatttacagaaatttggtattcgctatttctctctgtcgatggtagcatttatgtcgttttattttgcttctattttacacgttacattttctcagctgccctggctattagctggcgttatagtaggagcctgctgtgcatttatctataattttgtcatctttaaagaccgacctgccaacgtgctgagatcttcaatgaaatcgtttcatattcaagtgaatttggtacttgatttaattattgagttaattcaaaagaaacagattgaacctgctcaaattaaacaatacaaccgcaatattaaaaaattagcggagtatgcacgtgtagcatcagaagagcttggcaatacagatcctcacgacatatggcctggcgtcacagctgaacaaatgcgcctttatgtatttgatacagttatgctgcttcagacatattccccggcaattcgaaaactcagtgaattaaaggcatttaatcattttgatattcagcagctgctgttaaagctagtggaatcgattcgcgaagcagaggtattaaatgaaaatcctactcattcactaacagatgcagctcagcatctgcaagagctgcgccaaaaattaagtgaactcgaacctcaagacaaaaggtataaagattggctttacttaatacgccgtatcgaaacgatatcaaatcacgtgattgatgaagcctatgagctgcagcaagcaattgtgaagcaagaaaaacagcctcaaaaagaagtggaagaaaaagaagacgaagaggataatgatgaagaaaaaggattaaaaccctctacgaaaaagtctattcaagcggtcatcactgctgttgcgacattaatatttggctcttttttatctccatcgcaccaatattgggcgctgttagcaggatatttagtgcttcttggtacagaaacgataggaagtacgtttgtaaaagctgtacagcgaagtgtaggcacgcttttaggagcggctgtgggctttgttgtcgcaagctttgtttcaccaggaatacttgaaataacgctgctttttatctgcgtgtttatggctttttatttctttcccattacgtactcgtttatgagcttttggattacaatgatgctggcctttatgtatgacatgcttcttggaggaatttcagagagcttattactggctcgcgtattagatacagtcgtaggagttggaattggcttagccgtatcagctcttgtgtttcctaaaaaaacaagagataaaataaccgacacatcagtagaatacgtagcagctttaaaagaatttgttcacacctatttacatcgttttacgaagcagtatgcatttgccaatttagctgataaaggaatggaattagaaaaaaagctaaaacagcttcatgtcgattcagatcctattattaaaggtttcgttggccgttcacgtcttcagcaatttttgactgtttttaccgccattaattattacgccaagcatttggtagcttcttctactagaaaccaggctttttataaggaagcagaatttcacggcgtagtcaaggaagtggaagagaaagtagcaagcaatttcactcagcttgaaaaagcgctgcgaggagaaagaggaacgtatgtatacacgattgaagatgtaagacaaaaaattgaacaatctttagattattttgatacgtccgttcaatcaagaaacttacagcatctgcagctgctgcataacatttattacgtatggaaaatcaatcaatcggttgttcacttagccaaagagctaggagcagaagaaataagtagtgaagactaaaaaccagcgaatatgtcgctgtttttttagtctgatgaataaggagacgtatcttttctaatcgttctccacgttgttttaagaccggcatagctgccaattgccgcgtatccataaaaatatcccataaacaacccggcaataatatgatgaggatgactgataaatactgaaaacagcacgccaacagccaaagcaatagtcggcacatactgctttttaggatgaaaaagccatttgatcagctgcgtcacgattaatacgacaggaacaccaatgactgcgtcccaaaaatttgtatgaattgtagggaaatccatatgtaagcacctcgttaaatgtgttagatgtaaggttatctatgctgtttattttaaaacacttcaattagagttatgaggggctccaggtggataataataaggaggaattttgagccatcctttttgctgcattagaatttttacttttgatcctaatatgattttttcagtgtggaatttcaaccacattaatccaatatcggttctaatagactgtcccatattcgtgctgcacatgacgatattagaggcaatttttacagatattaagttagcgatttcagaatccgtggctttcgctcctaatggaatactgttagggtcagatttcggtttagtagccggtatttcaggaaggggaattccttctttaatcattaattttttgagtgtatcaatctgagattcagccaggttttttgagtcttgaacaagcttaagcagttcactgttcgttgttgtattaagacaggtttctaaggcaggtatttcttccgctaaagcagtgaaataaagccagcaacccatagtctcaccaatatgtgggcgagggggaggatcatctgtagaagagttctttatataatcaattagtgtctcaatgacgttaatcataacttttcaccctttatatagtttatgcatcttcattattaccttcagcagaaaaggataaacacagctaagaaatgttacgtataaaattgattatgataagtggcaggaaaagcatcctacgcagcaatttataatgatgacgttacatttagtgtcaccacatctaaaggtataaaaattgttgaaacgcttgataaatagcttggtgctagaagataaagtcaatagaaaaaaaactccttgcttatcaaggagttttttagcaggtgtattatatcgtttttctccgatgctctctccataacgaagttagttcctctgaccaatatttataatcaaataccgttatatttttgctgggcataaaaacattcaacagccaattaacccttaatttgtctctgacgcctatcgttttatcatttttacaacagccttcatcacaaggtttatcgtgtatcttgtaaggaatatttttaacgactaatccatttttcacacgttttgtgtactcaattcctataatcaaatatatcactcctcacagtaactcttatcttcataatcatatgtatgaatgacttctttaatgaaaggggaagaagggaggaagacaaaaataaaaaagccctgctgtagggcttttaaatcaagcaacttttgatgcaacgacgattactttaccgtgatctaattcttcttcatagcgttcagcttccggctgtgataatcctaatgaacgcattttggcacgaagctcgtctcctcgagaacgaaacacattcgcaatcgcatcaaaaacaccttgttcagaaagaccgatattgtttgtatttgttgcagctgttaaatcctcggagcgatcttgatggtgtgcaagtaaataaacttcgtcttttgtaaatccttcacgcaaaaattgttcgattgtatcttttgcctgtacgccattttcaactacttttacatttaccatttcaaaaaacctccttgtatgatagacaactttctcgaatatgtttagtaatgaagagaagtttaagtaacttatctccttgctttgtgtatacacgttattggaagtgataaaacctatttccagaaattgagttaaaaagtctaacataggaggggaaagcgctgttgtttttaaggagaatctgggaaaggatcagcaggaagatgctttagcaagcctagcatttcgcttgcataattatttttatttgtacgacaaatactacttttttggtatgaagtttaagctacagacgtacgcacattttttgaaaaatctctcaatataggacaggcacccgtgcacattcctttctttttcatatactgatagggacaaagaaagaaggagatgatagtagaatgggatgttgcaaaaagagattccacaactgtgaggaccatcatcacagcagatgttctcgtaagaaaagatgtcacaagcatgacgactatggtcacagcagatgctcttgcaaaaaaagatgccacaagcatgatgactacgactatggccacagcaaatgctcttgcgagaaaaaatgccataagcatgacgggtatgagaaaaaacatcattgtgaagaccactgcgacaatgattaccgcttaattgttttttaatataaaagtaaaaatgtaggacaaattccaaaaagcctgtatcttaagtaaggaattaagatacaggcttttttcatacataaaaaataaaagcttaagatgaaaggcgttctttttgtttttcgtacacggaagtggattcattccacgtataacgaccgtcttgcaattgaatggtcgcgctgaatggacagtctattgacgtttctgcgtcatctaaactgctttcaagcaaactttttttgaatcgaagtaaatcttctttcgacgcaattcgaaaaaccatttctaacgtaagatcatcgtccattgcattgtgtaattgactgatgctttttcggaattctttattatattgaagcataattttaatgtctgctacgcaagcaacaccaaacacatctttcacaacagactcaaccgttaactgcgttgtcgaagcatacgttgaaatatcacgctgaggattttctaaataataaatcgtttctacaggatgtctcgtcataagcacctctttcttactacttattatacaggaaaaaagggcaaaacggggaaaagaattttaggaagggtttacataaaaaataaaaaaaccctcttattaaataagagggtaataagtgtgatgggaattaataaaaatctttttcagaaaaacgcgacgagacttttgcgactgtgagagtggcattgatagtagtaggtggtccgactgcagctgtaactgtagctgtaactgttaccgtatcgcctcttcttagataacgaaggaatgatgctgtagctgtaccagcagtaggagtaatagtttgagtgaagcctccagcgttaatcgtatacgtaacagttggggcaacagcagcagtagaagtgaagaatgctgtaaatgaaataaaatactcccctctttctaaaacttctagaccaccagacacaactcgtacgttctcacttggagatagaaggttcagtgttagtggagtggttactggtactcctgctcctgctcctgctactgtggttgtacctgttactgtgccaaacgcaggtctatcatcaaaatctggtctctcacaatcatcgtcacagcgtcttttgcagtgatgtttatgccattcattatcacagcggcgtctatactcgtcgtcagaactaccttttaaatattttttgtaataatatgacatgctttcacctcaccttggatttgaaggttttcaccttctagtatagtagatgcaggaggtgagggttttgcaatggacaagggtttaataatataaaatatatttacaacatgaagccaatggtaattctatataggttaaagatactttaattcaaaaatatgtaaactttaagttgataatctaggtattctatttacatgctagaggtacttggttaagacaaacaaaacgaggtgctgacttaaaggagtattttggcttacaacgaaggcagcctgcgcaatttgtttacagttatttttgtttcatctataaaactattaaacacttttttgtcatctatttgtaacaaaagtaaaaaaagtacttgttttttccaaaaaacatactataatattaactgtaatgcgatgagtaatacagttaatacacctagtacacacatcatgattttgggtagatgaagggaggcagactatgttcgatttagatattcgtagtcgcaagccgatatacgagcaattagtagataaattgaaagagcttattattcatgaagtctttaaggccgatcaaaagcttccatctgttcggctgttagcaaaagaattaacgattaatccaaatacaattcaaaaagcgtatcgtgaactagaacatcagaattatatttattcagttccaggcaaaggaagttttgtaacgcctcaagttgatacactaaataacgagaaggtgaaaaagatgaaagaagaattagtgaaactgttggcagaagctatgtatttagggatggataaagatgaaattctatcacttatttcacaggctgaaaaagcagtaaaaggaggaagcgatagtgattgaactgaaggcgataaaaaaagagtttgaagaaatggaagctctaagagacgtcacgctttctataaaaaaaggatctatttacggactgcttggctcgaacggggcagggaaaacaacgctattaaaaatcattgcaggtatttacaagcaagatcacgggaaaatcgcaatagacggcgaggaagtatttgaaaacgttggcttaaaagaacgtcttatttttatgccggattctctttattttttccctcaaacaacgattaagcaattagcgtctttttatagaagcgtctatccgacttggaacgaagagcggtttcaaaaattaaaagaagctttcccaattcaattacataaaaaggtacacagaatgtccaagggaatgcagcgtcaagtaggtttttggttagcgatgtctgctatgcctgatgtacttatcttagatgagccgctcgatgggttagatgcggtaatgcgtcaaaaaattaaaaaccttcttgtccaagacgtggcagaacgggaaatgacgattttaatttcatcacataacttacgagaagtggaagatctttgtgatcatgtaggcatcttgcatcacggtcaattattaattgaaaaagaactggatgatttaaaatcagacgtgcacaaaattcaagttgcatttgaaggagatgtgccgctagcgctttatgacacgctggacattttatatcaagaaaaacgaggaagcgtcttgctttgtattgttcgaggaaaagaaaatcacttagtcaacaaagttcgatcgtataagcctttaatttttgacatcttgccacttacgctggaagaaatctttatttatgaaatgggggatgtgggttatgcaatcgaaaacatcatcgtttaaccgcggcatgtggattcaatccatgagaaacgtgggatggattgggcttgtctacttgttagtactactgttcgctttgcctttacaactgattttcacttttacaggaaaggttgagccttatatagagaaaccagacacgttatttgacgtatttggcgggctagaattcgtgcttatgttcgttgtaccagtgttacttggtattttcctatttcgatatatacaaacgaagattgcggctgactatattcatagtttaccaattaaacgttctacgttgtttcatcaaaacatgcttctgggcgcgttggttttagttgttccgattttaattacgggcatcgtgacttttgccgttaaaggggttttaactgttgagaatgtttatacaacaggcgacgttctaagctgggtcgggtacagtattctgattaatttatttgtcctaactggaactgttttagccggaatgttcaccgggatgtctgttctgcaaggaatctttttatacgttctattccttctcccgggcggaatttcttatttagctatatcgaatgtaaagttttactggtatggctatgcgtatgactattacgtgaacaaaaatgttgacagccttatcccgtttttacacgtagcgaaattggcagctcataaaagtttttctactagtgtatttgtttatattggactcattgtcttattttacatcgttgctttaatcacctatcaaaaaagaagagtagaagctgctacgctaaccatttcagttggctggttaaaacctgtattcgtatacggagtaaccgcttgttcactcatgttaggcggattttactttattagcatgaaaggtgaattttcatggatggtcgtgggctatattattggttcattaataggctatacagttgctcaaattattttaaataaaacgtggcgcatctttacgaaatggaaagggtatctagggtttgttatagctgcagctattgtaggctttatcattcatttagacatgtttggctattctactaaagtgccggcagtttcagagattgaaagtgtgtatttcgatgaagacatatatcgattgactgataaacctgaaaactatgcaaagggaatgaatggctattatgaaacgccatattactatacaagtaaagaaacgattaagagcgttcgtcagctgcaaaaacaaattacagcatctaaagataagaagatggatcctgaaaaacaaagtgaaatagagggcagcaatggaaaaatcgcggtatttgcttacaaattaaaaaatggaaagcaaatagttcgagagtactttattccattttcagattataaagctttttataaagaaattgcggaaacaaaagagtacaaagaaaatttccatccgcttttacgaacacaaaacacagataaaattaaaagcgtaagtttttctgttccaggaaagtcaaattccattaatattacaaatccagaaaaagtgcaagagcttatacacgtagtcaaacagtcgatgatgaacgaaacgtttgatgaaatgtacagcacaaaagaaagctgggcgtcaatcaatttcatggatggaaaaggacagtatgttcaagaagcatcttgggagaagtcatatagcgaagtagaagcatggctgaagaaagagcatttatatgaacgtgctcgccttatgccaaaggacgtagaaaaaaccgaagtctttaaaaattcttctcatcttaaaaatgattatcgtcttcaagaagattttacatctctaacgaaggatgagaaatcaattaaagtaaaaaacaatcagcaggtagaaacacttcttcaacgtgcgaacttacgagacacgggagattatcttgttgctttttattacaaagatcaagtagatactcctcaggtttacatgttgaatgaaaatgagctgccaaacgaactaaaagaaaaactaaaataacaagggagaacttattatgtgcggcgaggaattacaagattatttgaatcaggtgctggcttatttattgaaaaatggcgtgaatagacaagacgccgaagatattacgcaagaagtagcattaaaatatttagaaaaacaagaaatggtcgatcctgaaaaaataaaagcttggatgtttcgcgtcgcattaaataaacggtgtgatttaggaaggcgtaaaatagtgaaagaccgctatacgtcttcttacaaagaagagcccgttatgtatacgcctattcagcaggtgcttagaaatgaagaagtggctgaatgtcaggcaattttaaataaattgaatcctaagtatcgcaatttgcttctattaaaatatggatttggatttaaatatgaagaaattgccgagttattaaatatgcagatgactacgttaaaatcagctctttaccgcgcgcgcaaatactttgtaaagggatataatgaagtcatttaatataaatgaaacagcagcagtttgtgtaaaaagttctttttcacaaactactgctgtttttttcgtatttttcttctttggacggcatagataatcaaactgatcgcacaaaaagctaaagtgatctcaatgacgtcagtataagaagaggttgtattaaaaaaggaaccgaaaataaataaagcgagcgtccaaataaaaccgaaggaaaacgagactttaatataatgccgatgcttcattccgcttgccccgagaaaaaaaggcatcacatgtcgcattcctggtaaaaaatagcttgcgatgatggcatgagatccatattcttgaatcgttcgctcgactttcatcacatttttttcccatcgcgggcgttttaatagcgcaagcgcctgagttgaaaaaagactggctatcaaaaacttaagatataagctaatcatcatgccgctgtaggtaagtataaaagctggaatatactgaacggacggagatgtagcctgactgcccgcaagcataatatataccgggtcaggaataggagtaaggttggctccgactaaaatgataaaaaagaaatatccgtagcctaattggttaatggctccgataagctgatcaatcacgttttcttcctcctttcttcattagaatacgagagagtgacacacagtgttcgctcaaaataaaaataaagtataggtacgcacaacttagaaaaaaagagttataataaataagaatgtacgttcttcttttggggattaattatacagaaagaggtgatagtatgaaaatgatgtaccctaaaaacggcaaagttattcttcatattgatgccaatgctttttatgcatctgttgaaaccgcacatgatcatacgctcaaagataagcctcttgctattgctggcaatccaaaggaacgaagaggaattgttgtaacctgtaactatattgctcgtaaccgcggagtatatgcgccaatgcctctttgggaagcgaaaagaaaatgccctgagctggttgttataaaacctaattttccattatatcgccaagtgtccaaaaacatgtttgattatttagtaaccatttcacctcttttagagcctgcttccattgatgaaggctatttggatattacaaattgtgctgaattaggctctcctcttgacatagcaaagtccattcagcagcatttaatacagacgctgcaaattcctgtgtcaattggaatcgcgccgaataaatttttagccaaaacggcaagtgatatgcaaaaacctttagggattaccgtccttcgaaaaagagatgtccaaacagttctttggccaaaagccgtagaggaaatgcacggaatcggtaaaaaaacagctgagaagctaaatgcgattaagatcgtgaccatcggtgatctagcaaaagccgctcccggtcttcttaaacaaactctcggagtaaaaggagaagttatgaaagaacgagcatggggccaagatgatcgacaggtgaaccctgatcgccaatcacagtttaaatctattggaaactctacgacgctatctcaaaatgcagtagatgaacatgaggttctccctattttaaataaactatcgcattctgtaagctctcgtatgaaagcgaaaaaagttgtaagcaaaacgattcaattaacgatacgatacagtgattttaaaaccattactcgaagccaaactatttcaaaagcaattagcgagccaaacgatctttttcattacagtgcggtattatttcaaaggcactggaacggagaaccgattcgtttattaggcgtagctgctcttcaagtgagccaccagcttcaagaagaagaacagctggatttgtttacatacggagaacaagcaaaaaaagagcctttatacaaagcggtcgaaagtttgcgtgaaaaatatggagataacattattcaaagcggtttaaaaaaacaaagaggaaaaaaagagaggtaactctctttttttgtataaaatagtaggtttacactcattatagaaggggaagtacattactatcacggtaatcaaagtgattacaaaatgaatttgattgcgacttttttgattgtctgcaatgaaattacataaaataatttatgaggtgatcttatgtcagacgtactatttacatctaaggcaacagcggtaggaggccgagatggtcgagttaaatcagatgatggtattattgatttaacccttgtaaatccttctccaaataacaaagaagaaggaacaaatcccgagcagctgtttgcagcaggatattctgcttgttttgacggtgctttaaatttaatcgctaagaaacaaaaaaaagacattgattcgtctattactgcagaggtaagtctactaaaagaccacactgacgatggctttaaaattggagtggtgttaaacgctcatattaaaggcgtttcacaagaagtagctgagaagctagtagaagatgcacatcaattctgcccgtattctaaagcaacgcgtgggaatgttaacgtaacgttaaatacaacggctgagtaaataaaaagcgcctggatttttcttaaatccaggcgcttttttatgttcaattttatatggtctatttttgattgtacgtatgcagcgattgcaataactcctgcagcgtttctttcagcttttctaattcttcttgcgacttattcgtcatactaaaaacttcttctggaatatgacaagctttatcacgtaatttttttcctttttcggttaaactaataaaaacaacgcgttcatcttcatgagaacgctgacgaatcactaattcttgatcctgcattctttttagcataggagtaagggtgcctgaatccaaatacagaagttcgcccattttttttacgctgagtgtttcatgttcccataaaacaagaagggctaaatactgcggataggttactcctaatttatcgagcagcggcttgtacacctttgtaatttctcgagacgtggcgtaaattgagaaacaaagctgattttctagctgcagctgcttataaagttgttccattcatgttgcctccagtctattgctttttatttaattatacacaattaaatagtggtgtccaataacgccggatgaaaaagtaatcaagctgtaaataaaaaatgggaattttacatatactaagaaaaaaagggagctgtgcacatgtattttgcaaaaaaagccgtagaagaagaagtagatcaaatgatggatacgactgtatatgcgtgtcaatctgaatcatgtaatgggtggatgagagaagattttgttacggttgattataactgtccgatgtgcggaacggaaatgtcacaggaagtacgcgagctgccgaaaattaagtacgatcaccaattttataataaataaaaaaagaagcaactgcttctttttttatttttcactaaaatttcattaagctgcgctagactaagaaccaacatactatgaaggtgaggaatatcagaatgaatcaagggaactttttgaaaggtttattttggggaaccttatttagtattcctatttggatttcattgtttggctggttccgcattttatcacatcttgcatagtttcgttttataaaccgtcatacgcgcccttatctttctatttccgctataataaaggtgatagaaaaaataaggagctgttctcatgattcaatataaaacggagcaaatgacggtttttgaaagcgcgctatttcaaacaacatctgcggtgattgaaacaaaagactgtgtcattgttgttgatccaacgtggcttcctcacgaaattaatgaaattaaacagcatgttcaagggatcttaaaccaccgcaacctgtatgtgttttttactcacggagattttgatcacatcattggatatggggctttcttagaattaaatgccacctttatcggcagcaaatttttagaacaacacccggacaaagaagaaaaagttcaaatgattaagcagtttgatcatgactattatataaaaagatcccatgatattatattcccagagttagatattgttgtaaccgaaaatgaacagcatattactttaggtgaaacatccattacctgttattttgcaaaaggtcatacaaacgatggcctatttatgattgtcgatgattcgatatggattgcaggggattatttatcggattttgaatatccgtacatatatgaaagtgtaaacgattaccgcgacacgcttgcgactgcgcgacatattttagccaagcaccaaaatctaacgctagttcccgggcacgggaaaacgacacatcaccgagctgaaatccaaagacgagtggagatggccagctcttatttagatgaactgcaagcggcagtgaaagaagacagtaaagaagcgctcgataagctgaatgataaactggcgtttccctctgatttcaccgcacaatgtcatcagaaaaacgttgaaattatgaaaagagaattgctgttatagaaatcgagtgtacagtcatcccgtcgatattaaaagtaagaaaccgcatcttctgttggagatgcggtttcttacgttcctttatttatcaattaaaagaaactttttccttttatatccgtttatataaattaagaagttattttatttataaaggagtatgacgatggggaaaaacggttgtataaaatgcggacatacagaagcaaaaacaaaagaaattgctacaacgggaacgggactgtctagcttagatgttcagcacaatcactttacagtggtatattgcacgagctgcgggtattcagagctatataataaatcatcttcaagaggcagcaatattatcgacttattttttggaggatgaaaatgtgtatcgatcttattgaaattgataaagaccggcgcgcttcctatttaaacctgctattaataggggatgaagacgaaaaagtagtgaagtcgtatataaatgaaggttctttatttaccattgtgtatgaaaagaaggagataggagttgtgcagtgcctcaccgatgaagaggaacgggcagtagaagtaaagaatatcggtttaaaagaagcatacagaggaaaaggaatcggcagcaaagttattaaaaagttagaagtactgtatgaagataaccattattctaaaatgattgtaggaacagcggactccagccttgaaaacatatcattttataaaaaggcaggcttttatcaaaggggtgtcaaaaagaatttctttttgcagtacgttccaccgatttacgagaatggcctgcaagctatcgatatgattatgtttgaaaaaaaattaaaaagcagaagcgactaacacgcttctgcttttagtgattaatctaaaatttgaagttttaccgttttgcgtccccaatttaaagctgagctttgagatgccataaataaatcaacgcgagtacctttaatcgcaccgccagtatctccagcaattgcttctccgtaaccttctacgtatacgcgagaacctaatggaatcacgcgaggatcaactgcaattacttttcgattaggatttgaccttaggtcgatgcctgtagcagtgattccgctgcagcccgcacagtaagcagtataagctgttgcttcaactgtaatctctttcgaaaccgacttcctttcttgcgctggagcaggtgccggtgttgaagttgaagttgacggtattgaaggagcagtagtcgctggcgttgatggttttgcctgagctgcagcttgtccgcctacttgtagcacttgattaatgtaaatcgtattagacgataagttattccactgttttaattgagaaattgaaatgccgtgccgctgtgctacgctccacattgtatctccaggctgaactttgtaacttttactgttgctaggagccggggatgcttgcgtttcgtttgttttttcttgtacaggtgctgaaggtgatgacgaaactgttcctgttccgcttatttttaatacttgattcacataaattaaatgactagatatgttattccactcttttagctgctgtacggaagtaccgttgtttttagcgatacggtaaagcgtgtcacctgattttactgtatatgtatgatttgaagatgttgtagttggagttgaactagatgaagagtcagtagatgtagatccaatttgtaatgtttggtttgcataaattaatgtggaagaaagaccattccacttttttaagtcttcaactgttacattatgctgctgtgagatgctgaataacgtttctccagcttttactttatgcgtgtctgtgtccgccgatgctgcgtctgcaattccaattgatactaaagctgtggcccctaatgtaaaaatgtgttttttcatctaataattctcctttatttccaatagttgtctcttattctatcagcaatatgtaacaaactcatgacaaaatggtaggttttatattacaagtttgtaacaatacgtctaaaattatagaaaaaacgcggtttttttacgattatgatgaaaaaagtcttaatttgtctggagagatagaatagtaaaaaaggtgttctgcttttataaaaatgaagaggaaagaagctatgctatattcaaatgacatgatagaatagacaagttagaaatgaacggatgaaaagggagttagacatctatggaaaaacgctctatctcttcatatttaaaagcatgggtgcgcgcactttcaattgagattaattatatgaagaaacacggcggagaaaagtatacggtaggaaaaggagaatacttagggcagcagggagatgcgtatctttaccggtttgaacgcacagccgatttatacctttttgatggagctcaggtacgccttgtccaccagcataaagaaagtaaaggagaagttatcggaacagaagggtttgatttgtatcttaaaatagatgcgtttattggacaagaagtagacgaactcgatatatataacgaaccatgggaattattgcaggctcttattgatagactcacggaagcaaaagattacaagcaaaaaatagtgagaatcaaacgtcttatgagaggtaatagtcctgttcgtcataaggagtatacgtctaagaacgctcttcatgaagtgttgctgcgagcgcgttataaccgtactacttatatttgggggcctcctggaacaggaaaaacatatacgctgtccaaaatcgcggcaagctattaccggaaatcaaagcggatccttttattatctcacagtaatgcagcggtggacggtttgctgcaagaaactgcgcgtcagttaaaaaagaaagaagcttggaaaaaaggaaaactcattcgatacggagcaacaaaaagcagcggcttagaaaatataaaagtagaagaagtcattagagaagatgatccggatttagctcaggagatgcgtgatttacaagaagaacgagtttacttaagcaggtatcccaatagagcacaccagcttcagcaagttaataaaaagctaaacgcccttcgtaacaagtggattgaagcggagaaaaatatttttgatcaagcgtatattgtaggcactactttatcaaaagcggctattgaccgattactttatcaaagtgaatttgatatggttgtggtagacgaaattagcatggcatatgcaccgcaaattgcttttgcagctgcgttaggaaaacgaattgtcgtgtgcggcgattttaaacagcttcccccggtatctcaatcttctcatgctgaagtgaagaagtggctgcagcgagatttatttgagcagacgggtcttgtagagcaagtagaaagcggtgagatacacccgcatctttttatgttgacaaagcaaagaagaatgcataaagatatctcagcttttacaaatcgttatatttacagcaatcgagtaggggatcatccatctgtcacaacaagtcgagaagtagtagcaagcagccggccgtttgctcatgaagcagcgcttatgcttaacattggtcatttgcattcttccgctatgcgagatgctgcttctggctcacgctacaatgtgataacggctgtgttggcggtaagtttgatgctgcgggcacgcaaagcttcttcggctactcttggctatgtgactccttataagtctcaagctaaattgattaatgcacttcttcaagatatcgaaccagctatcgatataattgcagcaaccgtacacaaatttcaaggcgcggaacgagatatcatgatttttgatacggtcgatacaaagccgcagtcaaaaccaggtttacttttaacaaatgaaaatagcgatcgattggtaaacgtggcggtgacgcgttcaaaaggaaaatttattatgctttcagacgagtcgtttgcccagcagcgtgtaccaaaggagcgagcgttatggaagttggtcaaccactttaacgaaaatcaaaaagtataccagcctcagcaatttttaaaagaagtcattcagcatcctaaattgatttggtaccatccatcgaacagcagtcagttaaaaaaagacttatatcaagctcagcagcagattttattgtgtattccttatgcttcccttgttcctcaagaaatacgggatatgttacattcgtttaaaggggaagtgaccgttcttactcgtgaaccaaaagaagttcggattgacggtgctcatatcatttcatctgctgttccgatgtcactgcttattatcgatgaatccactatatggatcaatatgccttatggaggaaagaatgaagcgtttatggcagctagaattgaatcaaagctaggcgctaaacagcttattcggtcaattgattttacggaagataaaataagaaatcaagaaacaaaaatgtatatagaaacaaataaaccacaatattctctgagcgattaccttcgcagctgggatcgctgtgaatcttgtcagcatatgcgagaagtagagataacaaaaaaaggaaaagtaaggtttatttgctattattgcgggaaaacaagtggggcaacacgtttattagtagaaaaatatttaaactacgtacatgctgtatgtaaagcatgcaagcagccgatgaacgtagattatgatgaaaataaaggtgtctacgcatgttgtccatcgtgcaaaaaggaagttttacctaaagatttattgtaactttaggaaaagggcgtgatcttatcgtctactctcgtaatgtagcggctttagctgattgtttgctagaaggagacgttcaaaaaagctggctgcttattgctatatatatagaagaaggtcattcttcaaccgacgtatatacgtttctgacagaagcgatgtatgagataggaaaaaggtggcaagaaaataaaatttcagtctcggatgagcatttggctactgcagcctgtgactatgtgttaactcgttttcagctttctcagcggcaattgcttcagcgtaatcgggcccttcttttttgcattgaaggagaagagcattacttaggcattaaaatgattgcaggacttatgagagaacatggatgggaagtgaaaaacttaggagccaatttgccgctaccgttcgctttaaaaagtatcgagaagtgggaccctgatgtagtatgtttgtccgtctcacaagtgcatttgctgcctgatttacaaaaatacattgctgagattgaaaacatgccgcaaagtcctcttgtattagtaggcagcaggcttctcaatacgcatgatttatcggcttcaggatcttcaaaaaccatattcattaatcatattcaagcttttaaagactggcttctaatcaacaataaagaaagttcgacgcaagataaaatgttagcaatgggggaagaaatatgatcagtttgccgattcaacacattccggttccaatgtttttactcaataaagacaacgaaataattgaatttacaccaagcgtcacgaaaaatttcccgcctgttcaaaactttttagatctagttgatgaagatagtcaagaaaaagtaaaaagagcactccagggaaaggaagaagtgcaaatcgaagtaaatatgcgcacgttttctaacccggttgctctttttgattttcattttaagcctgaagcctatcattcgctgcacgctgttttctgctatcctattcacgagcatatgacgagtgttcaatcaactcttcaacagtttcgctctatgcttatgcaagactcatcacaagtaagccaagatttttcagtcagggaaccagatgtagaaacggcgaaaaaaatgcagctagttgatcttcagcgtcattttcgagaaatgaaaacaaatgtgctaaccattcaagacctcttgagtattatccgctccgacgtaattgaagcaggaaaaggagaatatattgaattggtctctacacatttgtttgacattcaagatttaattaatcaggagcttgactgtttaagacagaagaacaaagtacattaagaaagcggcaatcgaatttctaccgttgttccttttccttcttcactatcatatgaaatgcttcctttatgattactaatgattttgtgactcaccatcaatcctaatcctgtccctttttcttttgttgtatagaaaggcttgctaattcgcgttaatcgatctttcggcatgccttttccttcatctatcacttggatgactacttggtttgtatctggatcaaatttagataccactagaatagacccagggtcatccatcgcttcaatagaatttttcaccatgttgataaatacttgtttcatatctttttcaatacaatgaacaacaggtaatttttcttcaaaatctgttgaaatagtaatatttttaagaatggcctgtgtgtgcagcagcgtacatacgtcttgaagaattaaatttatctgcttattttcatattttacgacttcgggtttggctagaatgagcagttcgctaataatcagttctaagcggttaaattcggacatcatgacatccatatattcttttttatacgtttcttcttgcatcataagctgtaaaaagccctttaatgatgtaagagggtttcgtatttcatgggcaatgccggcagccagctgtccaagtgctgacagcatctctgaatttttgagcatcatttccgactgtttgcgctgtgaaatatcttcgcttagccctatgtaatggatgatttcgtcttgatcatttttaacaggcattaaggctaactgttcccaaacggtttctccgtcttcttgaacgtaggaaatttctccgttccatttttctcctctatatacttcattccaaatcttagggaaccttttaacccccaacttttttgtatataagtcatagaggtgcagcccaaatacttcttgcggcgcatgcttttgctccatgaacttttgattaatgtacttaattttaccttgatgatcggtaatgaaaatgcccgtaggactgtgagctactgcaaatgatgtaatagccaattcttcatttgatcgtttaatttctgtaatattaataaacgtaataactacaccgttaattaaattctcatttgtacgataaggcatcattttcatgctgtaccattggttatcgtagctttgaatttctttttgaagggtattatttgttcttaaaacgtgcattgcgtcctcgattagatggtcatatctaaagttatgcgaaatatgaaagaaaggtcttccgatatcttgatgaagaacgttgatcactgttttcgtttccggcgtaaataatttaatattcagctgctcgtctaaaaagatagtagcaatagttgtactgattaataaattatcaatatcgttatttaagtccgttaattcttcaatctttcgctcgtactgattgttaacactaattaactcttcattaacagactgcagttcttcatttgtggactgcagctcttcgttagaagcaatcagttcttcattcgtggactttagctcctcatttgctgtttctagctcttcaatcgtcgtttgcaaatgctgctgcgtgtaatgaagctcttgctctaaatctactacaagctcactaatcgagctggtttgattaagaaacatgggcttttccttatcaataatggcaccatctgtctgttcatcaaacataagtaagtaaagagagtgatttgttggaagagcagatattgtgaggttaaaacggcgctgaacgttgtttatgacaaactcaatgtgctgacagcatacgctcataccttgctcttttacgcgtttaatagctgctccaatggctaaagagacgtgaactggaaccattttgaaaattgtataattaattttccctacaggaacgttaataagctgagtcgtttcttttgaacaaaatatcacttcgttgtattcatttaatacaagacaagggctcataaagtgatcaatcattgactgatacatctcatctaatttaagcgaaggaagaggcttataaagttgacttggcagcggcacgctagaaaaatcaccttcatgcaagttggattttgaaagattaaaagctcccgtaatttgtcggctgggctgtccggaacgcttaaatattttccacttactgttgatagggcggaacaaatcagacaagtttcccgttgtttcgctagggcctaaaaaaagtacgccttcttctgtcaaagaaaaatgaaaaagagacagaatgcgctgctgcagttcagcttggaagtaaatcatcatatttcgacagctaatcaaatcaacgtttacaaaaggcgagtcttttcctatattatgcggagcaaaaacaatcattttgcgaattgtttttttaacttgataaccgccgtgttttgtttgctcaaaatattcattaatctgagctgctgagaaggaatgaacttccgcttcttcataaataccttggcccgctcttttgatcgcatgacgatcgatgtccgtagcaaagattcggacatcgaaataacggttgattgttgataaatagtcatgaagcaaaatagctaacgtgtatgcttcttgaccagtagaacaacctgctacccagatgcggatttcatcttcttgactatgaatctttctttcaactaattgtgggatgacttgttcttcaataatagagaatgcttctttatctctaagaaattgcgtcactccaatcagcaggtctcgctgcagttcgacgatttcttcggcttctttacataaatagtcccggtactcttccattgtttgagagggaggatcgagtaaagccattctcttttcaagtcgtcgcagcaccgtgttttttttgtacatggagaagtcgatgcctgttttcttctttattaatgaataaatgtattgcagcgtttcttcattatatgtaaattcagtttggctgacatgcgtttgcacaaggtcaggcatatcagcaggagaaagaatataatcagcaaggtgtgcatcaatagcgcttagaggcatatctctgtactttgctgtgctttcatcttgtacaagtacagttccgccatactctcgtatcgtttttgctcctcctgttccatcatttcctttgcccgataaaataatggctgtacaccggtgtttttttgcagcagccagagaatgaaaaaaggcgtcaatcggatatttcacctgatcgttttcttcataaggacgaaggcgaagagtatgatccataacggtcacataatgatggggaggatttaaataaattgtgtcttcttgtaaagtcatcccgtcttgtgtcagtttgatattcattcctgttttttttgctaaaagttctggcataaaacttttatatttagaggaaaggtgctgtacaataataaacgccattctatttggtgaaggcatattagcgaaaaactgctcaatagcttctaaccctccggcagaagcgccaattcccacaacgtgtaaatcctgtttctctattccttctgaagacgatggaactgtagaaaacgagttgttcttcataatagaacctccaataatgtttcgatacttcctagattgtatgtcgttttgtttattttaatgtcgacagcacggcgtggtttacatcaaaagtaaatttttcaaaaaaaccaagatgctggtacataggttcattttagcaaacctattatattgttcaaataacgttttcaaaattcctctatttttcgtaaaaaaatttaaagtccaaactatataatatgccccgattttctttatataaacgtatttttataaaaaaaatcgtttttttttgcagaaaaaaatatttaaaaaacttttgtttgcgcttacatatgcataaggttatacgctcaaggaggaaaaaaacggttaaattcaacttgacactctttttcagcatgttactataggaaccgttgaaagaaacgagaacaaaaatacgaacaaatgacaggggagatttgatggatcaaaaacaaaaagttgcttttttaggtgctggatcaatggcagaagcgatgatttctggtatggttaatgccaagaaattacctgctgaaaatattatcgtaacaaatcgaagcaatgatgcgcgactgcatgaacttgaaaatagatatggtatcacagcagtaaagcgcagtgagctgaaaacagatgacattgacgtttttattctagcgatgaagccaaaaggcgctgaagaggcattaaacgaattaaagcctcaaatcaacaaagaccagcttgtcctatctgttcttgcagggatttcgtcttcttacatggaagagttgttgcatgatgaacagcaggtcattcgagtgatgccgaatacatcaagtatgattcagcaatcagcaacggctatatctccaggtcaatatgctgcaatggatgctgtgctaacagcaaaagagctgctttctgcaatcggaaaagtatacgtgattgatgaaccacaaatggacatttttacaggaattgccggaagtggacccgcttatttttatttccttatggagcatatcgaaaaagcagctaaagaagaaggtctcgatcctgagctagcacgtgaaattggcgcccaaaccatttacggtgcagcaagaatgatgatggaaagagatgaaacgccgacggagcttcgtgaaaatgtgacgtctccaaacggtacaacagcagctggtttagacgccttagctaaacacggcggcggagaagcgatgatgcaagcagtcaaaggagcatcaaagcgttcaaaagaaatgagtgctcaactacaaaaagtggcaagtactaattaattcgtcacttatcttcttcgtgaattcctcaccacaaaaaaataatcataaacaagaaaacatacagaacacactaggagtgatttgatgagtcccgacaataagaagcgggttgtaattaaaattggaagtagttcattaacaagttcacatggtgaaatcagcagacggaagctcgagcgccttgtggaccaagtcgtagacttaaaagatagcggtcatgaagtactattagtttcatcaggagctgtagctgcagggtaccgtaagcttggctgcttagagcgacctagctctttacctgaaaaacaagcagctgcctcaatcggtcaaggactgttaatggaggcttattcagaactgtttctatcacatggatacgttgcttctcaaatcttaattacgagagacgatttttcagacgaaaatcgttacaacaatgcacgaaatacaattaacgtgctgttagaacgcggcattgtgccaattgtcaatgaaaacgacacggtaaccatcaatcgattaaaatttggcgataatgatacactttcagctaaagttgctggactagtggattccgacctgcttattattttatcggatatcgatggcttatacagtgcggaccctcgccaggatccaaatgcaaaattagttcctcacgtaggggaaatcacgcaagacatcgaagaatctgcaggagattcaggaagttcagttggaacaggcggtatgcgctcgaaaattgacgcgttcaaaatcgctatggcgtcaggaattccagcatttttaggaagagccggcgtgccaaacatcttaacacaagcggttgacggagatgcaacaggaacgtattttgaatctgaagatgattctgcgaaccttaatcagaaaaagcagtggattgcgtttaactctggtcctgaaggggaaatagtagtcgaagatgccgcgaaatgtgcaattattgaagataaagagcctttacttcgcgagcacgttaaatatattaaaggccactttagtgaacgagcagttgtacgtattctagataaagacgaaaatgagctggctcttggcgtgacaaattattcatctgatgaacttgcactgaatgagccaattgatcaaccgatcgtagacagcgaaggtctagtatgtcacttagaaattccagtaccggtcggtttgtaagcaaacatgctgtaaagaaaaggagcccttccttttctttgcatgattgcatttacctcttatgcctcacactttaaaatcaaacaaaactaaaacgaatccaggagtgatttggtgttacaaacaaatgaaaagtattcagtagaagaacaagctatttcagcaaaaaaagcagctaagcaattaagtttactaacaacagaacaaaaaaatgatgcactgttaacgattgcttctacacttgaaagcaacacggagtatattttaaaagcaaatgaagtagacttaaaaaacgggaaagaaaaaggttttgatgaagcactgatggaccgtcttgctctttcagcggaacgtgtaaaagaatttgccaacggccttcgtgaggttgctgagttagatgatccaacaggagatattttatcaagctggacattggataatggtctagatgtaaagcaagtacgcgtgcctcttggcgttatcggaatgatttatgaagcacgtccaaacgtaacggtagatgcaacaggcctagcgttgaaatctggaaatgccattgtgttaaaaggcggttcttcagctatttcatctaaccaagctatcgtggacattattcataaagctcttgatgaaacgtcaatccctaaagaagcggtacagtttatttcaagtacagatcgtgcggctacgcaagaattatttacaatgaaagagcatattgacgttctaattccgcgcggaggggcttcattgattcaagcggtcgtcaataacgcaacggttccggtgttagaaacaggagtcggaaactgccatatttacatcgatgaacaagctgacgttaagaaggccattccgattttgattaatgcaaaaacagatcgaccagcggtgtgtaacgcagcagaaacggttcttgtacacaagaactggctcgattctcataaagatgaattgattcaagcattcatcgatcataatattgaagtatatggtgacaaagcgacagtaggtgaaattcctggagcaaaaccagcggctgaaaaagactgggctgaagagtatttgcgcttagcgatcgcgatgaaagtagtagagagtgtggatgaagcgattgaccacatcgaaacatatggaacaaaacactctgaagccatcatttcagaagatgaacaagccgtttcacgcttcatgtctttagtagatgcagccgcactgtatcataatgcatctacgcgttttactgacggaggagctctaggatttggagctgaaattgggatctcaactcaaaagcttcatgcacgcggtccaatgggacttcctgcgcttacgacaattaaatatattatgagtggaaacggacaaactcgataagaaatgaaaagtgagcctaatcatgtgctcgcttttttttatgaaaagcaaaacaagtaaatggaagctgatttgtaaaaaattataaactctgttataatagtaaaatatataatttttgtgatcttcatttttgttcttttcagactatcccgttgttttaagaaaagcaactgctatctgctttgttataacttcatttttattttagtctttcaagacgccgtatgtattcctcaaagattgatttacggatgtatagtatcactttatcttgcaccatttaccacatttacacgctaagttaatcttcatttattatccacttaaaaagtactgtttaaaggagacgatgtgtatgtataatcgtaaaaatttagagccggctgttattgaagaaacaaaagtttgggaatgtacatcagatacgtgtaattgctgggttcgagataactttaaaagcggagatcagccaacttgtccaatttgtaaaagcgaaatgaagcaagctgtaaaagaactgcaggttattcataatcctagagtcattgattaataacttttaggaagacgttttttgaaagagttttttgaaaggggtttgtggatgtttctaggaattgatcatgttcagcttcttggtccagaagggtgcgagcaagaagcaagaaatttttatgaaaatcttttaggaatgaaaactgttcttaagccggaaaatttaaggcacagaggcggcatatggtttcaatgtggaactcaagaagtgcatatcagtattcaagatgactacatacctgctaaaaaagcacatccagcttttgtcgtggaagatattaagacgcttagacgtaagttggcacacgaaggctgcgttctttctgaagaagagcctattgcagggagagagcgtttttttgtccatgacccgttcggaaatcgattagaatttttacaatatgacaaataaaaggcctccaagcggaggtcttttattttagggcgttatctaaatacgtatataccgtttctttgctaactaatacttcattttctctgtctttatctttttgccacttttcccgtgcttttgctaatacttcttcggcttcctccttgggaatgacaatgactccaccgtcgtcacctgcaataaaatcgccaggatgaatttttacgcccccgcaggaaatggtttcatttacggttcctttttcttttttgctgcttgctgcgatcgtagagcccttacaaaatacggggaaattgagtctttcaatgtcttcctgatctcgtataacaccatctagtacaataccgcttattccaacaagcttcgccatggctactacgaaatctcctgctaaggcacggttacagtagctttttccatcaatgacgagcacgcttccgggctccgctattcgaatcgcttcaagcactgagtaattattgccagcaggagtatctacagtaagagccggtccaaatagtttgtaatgacgctgcaatggcttaatagtaaagtctaagtggtttgtaccttccattgcatctgataaatttgctgttgataatgggagctgttcattcaacatcgtatctctcctttttaactttagtttatctatccatattcatataagagaaagctcttatttatgaaagggcaagtagataacgttaagcattgaccgtcaattaattaactgcaaacgtacagcactagaatatttcagagccaatttttaatgcattgtattatatctttgaggcgctgtttctcgtatggtattcgtcatataagcgcgtatatcctttaattagtaataaaggcgaaggtagcctataaagacattattaaagaagggaaaaaaccaaagaactctacaaaagttactttagataatatttttaggaaagtgtaaaataagccgtatttaatgaagatgaaggacctttgttagttttatgaatgtctttgatttatatctaaatgatgttatataagcacgaaatacgtgcaaatgtttaatcctgtgaacatttgatggagcttgatgcatttttatataaaaaagtgaaaccttttggtatgatgaaacgtaggaacatatatggaaatcatatatgaaaaacatatgtgacgttagtcatttagtggagggaaaacaatggtaaaaaaattattggccgcatttatcgcattagcggttgtgttttcaccagtcggtggatcacttattcatgacggttcaaacgtagcaagcgcaaaagggtataaatcaggaaagcgctcttttgacagcggaagcaataaccaatcaagcttatttaaaaacaataacagtaattcagttaagcaaaacaatacgtctaaaaactcatcatctaaaagtacagcggctagctcaaagcgcggcggcttaatgaaaggtcttttaatgggaggaattgcgggcttattattcggaagcttgctatctagtttaggaccattaggaccaattttaggttttatggtaaacatgctcgtgattgtagctttaattcttcttgtagtaaagttattccaaagcgtacgtagcaacaagcgtaaaaatgaggaagtgaaatcttggagacaataaaaatttctgaacaagatattatcaatgcaatgtgcctatatattgcagaaaagaaacaagttcagcctcaagaagtagagattgagctaatgtatgatgatgactatggtttttcagcagagtcatacgtgcatgatcgtaagcaggttcatattactttgaacattattgaagccctgcgcttttggctggatacggaaatgaacgtagacccatacgcagcaggactagaactggaattagacgatgaagaaggcattatcgcttttgcaaaattaagtcaataaagaagccttcaatgcaaaacccgctcaagtgagcgggtttttttattatgattttaactgttcgttggaactggacttatcgtgttttttagtgaaaaaccaccagttggcatctccaagcaatttcataagagaagggacaagaagcattctgacaatcgttgcatcgataaatatagctaaagcaattcctacacccatttgtttaacaggcgttacgtctgtaaaagcaaaggcccctgtaattacaatcataattaaagcagcactcgtaatgattttactagtggaagctaggccttctaccgttgccacattattatcgcgggtttgatgatacacttcgtgaatgcgcgaaattaaaaagacttcgtagtccatgctaagcccaaatacaaggccgaaaacaaagaccggcagcactaaagcaatattagattcggtaagacctaaatgtccattttgaaacagccatacaagtaaaccaaacgtagctgttaagcttaaaatattcataatgatagcctttaaaggaatgaggacagaacgaaaagcaatcattaaaatgacatacgttgaaaataaaacaagagccaaaccatatggagctttctcataaatttcatcgaatatttcttgttcaaattttggatagccgccaatatgaacggtgaaagttgaacgtttgtctttccattttcgaacaaaatcttttgcttgatctgaattttggtctgtatctagcgtagcttttatgagcatataatgtccgttaatgaacgaatctacagctggctttgtctgtgcacttatctgcgggttttccagcatagcttgaagctgatcacttgattttacgtttaaagcggtagaaatagaatcgacttgcttaactaacgaatcttcttttaattgttttataaaagtaaaggcatttgttaacggcttttcattcagcatattttgcttagcttctagcacaaaataaacgtctgcggtgtttttatttataaacgtattgttatacgtgtcaaaagcttgacgagactcgtattttgttgggagcgcttctgaagacggtatttctagatgcatgtctcgaacgggaataagtgctactaacaaaatgataagagaaacaatcgtcatagttacaggctttttcatgacaaatgtagcgaatgaacgccacctagactgaccgccttgttcgctgacttttaagatgcgtaaacgattaatgcgtgtacctaatatagccagtatggaaggaagaagcgtaagagctgaaaacacagcaataaaaacaacagccattcctccaagagcgacgtttcggaaaatatccacttgaataaacagcattcccgctaatccaataaatacgcataatcctgagaagatgaccgagcgtcccgctgtttgaatggtaattttgattgcttgttctaccgattttgtttgaatttcttctttaaagcgattaataaataaaagggcaaagtcaatactaagagctaatccaatcattggaatcacatttaaaataaagatggacagctctgtgtacggatggaagaaatagacaacgcccatggtggtaacgacggttacaattcctatcataagagggattgcagcggctaccacgccgccaaaagctagaagaagcacaactaaagcaacaggaataccaatggcttccgcttttgctaaatcagcttggcttgctgtattcatatctttttcaataataggaccaccggttaattttacactcatttctttttcttcagctgaaagagttctgatcttttccactcgtttatccatcgtgccatcatcgtgattaaagtggataattccatacgctgtgcttccttttatcatcttgttagaagctgttggtatgtcgactttcgacgcgtctgatttttcctttgctttttgcatatactgagcgatcgtttgctggaatttcgagtcagaaactccgtcttttttttcaaacaaaacgataatctgagcttcgctaacatcaaatttattaactaaaagctgctcggtatctttatacattcctttcatttcaaatccgtttcctcccagcacagaaggaagcttagccgcataaaagccaaatccgataattaggattatccatagtattaataaaaatttcctgctcgcatataatgcgttcgctactttattcatattaacctccaattttttgtacagttactagactattttatactaacagttattgtaattagaagaagtattgtgtttttttgtttttcttgcttgaaaaagctttttagatagatgcgcaggggtgcttcctcagcaaaatcgtgtttatgtttcgggtaatttagggaacactgtacataaatgcacgaagggggattaaaaagatgcaaatgaaacagccagctaaaatgacgaatagttatgggtgtaaaaatgagtatgatacattaaaacgtgtggtcgtttgcccacctacatatatgaaaattgaagaaattattaatgaaacacaaaagcactatgcggatgaaaatattgatgagagcttggcttcaaagcagcaccgtcaatttgttgaatgccttcaaaaagaaggagtagaagtcatcgggctatctgcacaagagccatttccagaacaagtatttacgcgggatattggctatacgctcggagacaccgttattgtcacgaaaatgggcagcgagattcgaagtggagaagaacaagtgctagccgattggctgcagcagcaagatattcctttccatcaggtgccggaccatcctattgaaggaggagatgtgctgattgatggacaagctatttttattgcgctcagcgaccgtacaagtaaagaaggtgtggagcatatccaagagctgcttccagcctatgaggttgttccgattcctattgatcggtcttatcttcaccttgattgtgtgttaaatattttatcacctacagaagcgctcgtattttcacccgctttacatgagaaagaattaaatttacttcgcatgaaatatgacttaattgaagtaacaaaagaagagcagtttacgatgggaaccaatgtattatcaatcggtaatcagcgggtgatcagcctgccaatgaatacagaagtgaatgaagagttaaggaaacgaggctataaagtgattgaagttgatatatctgaaattattaagtcgggcggttctttccgctgctgcacaatgcctcttgaacgagtgtaaaaaagcttaaaaagaaaaaaagatctcggcgatagccagggatcttttttttgagggatgttgtataaaatttcaagtgaaaggaacattaacctatataagctgttgaaggaaaggagtgataaacatggcaaatcgtaatcctattttagttcaaggtgctgaacagcttcttgatcagctaaaaacggaaatcgcgggaagacttaacgttcagcttggcgctgagcaaacagctcgtgcaaatggttctgttggtggagaaatgacgaagcatcttgttgcaatggcgcaacagcaattaagtggtgcacaaggacacattcgctagtctgctctacataaacactctgatgaaaagttctggctcttttgagctggaacttttttgtgtaggaaacatcattctactttctcttgatcgtttgatttgagattttgcttgaaattctccactttcaaggttgaaaagtgcataaaatgggaaaagaacaaaaaaagagaaagtagaggtttatcatgaaaaagctattatcatttggaaaaagtcttggtaaagaaattcaagaagaccaagcaacgggactagcggctgagcaagcctattactatatgctatcattattccctatgcttattttactgatatcgattgttccgtatctatctattaaaccggaagaggcaatcgatgtccttcaaagcgttatgcctggagaaacggctgcaatctttaaagataacgtagctcactttataagccaaccaaacggcgggttactgactgtagggattttaggaaccatttggtctgcttcaaacggtatgaacgcctttatccgtgcaatgaaccaagcctacgacgtgaaagaacagcgctcgtttattaaagtaagaggcttgtccattcttttaacaattggattgatcgtaacaattgttgtatcccttcttttaccggtgttcggaggggttttgttaaattggataagcgaatggttttctcttccttcaggtacaacagtggttttaaatattctgcgctggattatcggtgtcggcattatggtacttgttttatccgtattatacagattagccccaaacaaaacgtttccttttgcccatgtatggcccggagcgctcgctgctacgctgttatggcagctgacatctttagggttctcattttacgtaagcaactttggcaattattctgctacttatggaagcttaggaggcgtgattgttctgatgctttggctatttttaacggggttaattctcgttattggaggagagattaacgctatttatcaccgaaacaaaacggctgcgcctcctaaagatacgtctcaggcgatgtaataaaaaaggaaacctttatagaggtttccttttttaacgtttaaagctattaacaagctgtttaaatgagttggctgtatatttgaccgaatcttttttgtactgcacatcggttttaatcgctgcttgtgttacttttaaatgatttgttttttctttgatatgatcagtttcgttttgaagatgttgagaagtggcatttacagagttcacagttggcttgatttttttattaaatgatacgcctgcgtaaataagatacgcaagtgatgccaaaacaacagctaagcttatataaacaataatcatcggtgtgcctcctttgtacgtatttatataggtgagaataaaatatatacgaatatcatcctctttatttaattgttatacccatttttaatcaaaacaaacaaaagcctaccgagaagacaatatattggattttttctgaaatttcattcatcattacatatagagttaccttgaaaggagagagaagaatgccgttagatccgcatattcaaatatttctaaatcaatataatgaaatgccccgtcctgctttagaggacgttacacccccgcagctgagggaaatggaaaagatgtccttaactccttctaaagaagtagttaaaaaagtatataatgaagaaattgaattaaatgaacgtatgctcactatacgagtgtatgaacctgaaggaacagggccatttcccgctcttgtttactaccacggaggaggctgggtattaggaagcctggatactcatgactctatatgcaggtcgtatgcaaatgaagcaaactgtattgtagtgtctgttgattaccgtcttgctcccgaagataaatttcccgctgcagtaaacgatgcctatgacgccctggattggatttcagctcatgcgtctcaattaaatatcaattcaaataaaattgccgtcggtggcgacagtgccggtggcaaccttgctgcggttgtgagcattttagcaaaagaaagacagggtccgtctattgttcatcagctgcttatttatccatctgtaggatttaaaaatcagcaccctgcctctatgaaagaaaatggggaaggatattttctttcaaaagatcttatggattggtttcgtcttcactacttaaacaataaagaagaagaacagcatccctataacgctccggtattactagaagatttatcgagtctaccgagcgctaccattattacagcacaatatgatcctctaagagatagcggaaaagactacgcggacgcattaaaaaatcacggtgtccccgtcacctatgaaaattatgaaacaatgattcacgggtttttagggtttcatgaatttgtcccactcgctcagcaggcgatcaataaaagcgcagctcaactgcgtcaagtatttgattctatttaagttgcaaagatatatagtgttataaattatatgaacttgggggaagcagcacatggatgtgctgttttttctgtatttggagggagaaaaggttaaaaagagtttcaaaaaaatagcctattatctcttttaaagttatttcaatgttataaataaagacaatgttatagaagttattgaaaatgatgcttcacaataaaagaaaagatttcatatcttaatgaaggttttttacaagttgaaacaaagtaggtgattaaatgttctattctaatttttatactccttttaactatgctttctacccttatttcatgccttcttttggacgtcctactggatatgtactgaattctagtggtgaagttgacagctggtggggaaattatccgttagggtatcctgcgaaagctccaaaatttttgagtggggggcagacgcctatttcaggacctgcaataccattcagtttcaggagttattattgaactgattacaagggttactgccgtaaaaggtaagaaagatacgtacaaaattaaagcagtatttaaagcgactgaaagagatgatatttaattcagtcgagaaagtcgatcatagggtcgactttttattttaggtaattaacaagtttgatttggttaatgaagggaaaataataagtaactaaaaggaggtggagttatggattataaacaaaaagattattatatcagtgcaaaagaaaatgagtattataaagtaataaatgtagtagatcatatgttagaggaagcacaaagtaataacaaatatccagtatggggcgaaaaactaagaacagagttaaaagaaagtgctggtaataaccttactccatggcattttaatatgataatatccacacttttagattatgtacctgaagaagtaaagaataaatctaatgctaagtcactctgatgagtggctttttattatatctatagtatgcaaattaaaatatgcgctaaataataaagggtaaaaaaggtggctaaacaacatgcctaaaaatccatttaagatatgtaacacagaggaatgttgtcaattagcttatagaaggcaggtgtactcctgttgaaagagcctatcaccttatagaagtgaaagaggattggagtaaacgtttctctataggtaacttatagagtgaacgtaaagcacagcaccataaggttcactttggtgtagatggtaagaagtacaccaagattaagaagataagagaatctattagagaatgcttatttacagaaaagcaagtaaaagaattattaaaagttatagaaagtataatgatggattacattaattatagggaagaaaatgcagagaatgggaatgattcaaaaagaaaattatcgaaaaattgagaagggaaataattgaatagataaaaaaaataacctttttcgtgatattatttactcattaagggggctgggtgttgtgaatgaacaattaaaacctgaggaaattagcatagaagttaaacttgagcttctaaagatatgtaatgacgtaatgaacaatatagtgacccctaaagaattaattaaggacttagaaaaattagttagtcaaatcagtttatcagtttaatgtaacactccatacagggaaaagttaaggggagaatgctgtgaaaaagttgttagttggtagcattttgttgtctttgagtttaactatgggagcatgtgaccaaggggaagagaagaacgctgagacttctaagaaagaaactgctgtaaagccagaaaaaaagactaatgaaatagaattaaataagaaatctgaatctatacaaattcaagatgaacagaaagatttacgtgcgtacgctacaaaagttgaagaagaaaggaaggctaaggaattagcagaacaaaaagcaaaagaggaagcggaagctaaacgacaagtagaaatagccgaacaacaaagaccacaaaagattgccgaagaacaacgtgtatcagctcaacaagcagagcaaaagaaggaagcagaatctccagttagtcaagaaacaatcgataattatgaagcaaatcaagctgaaacatgggctgaagaggctgagattgaggaggaactgaataaagaagaagaagaaagattagctaaagaaaaggcagaacaagaagcatatgaagctcaaatcattgctgaacaagatgctaatttctccgatgaagcaaaggaacagattcaaaaagaaattgatgaagaaggatatagtcaaacatcatactattgcgatcaagttatgactgctgtacaaagaggggatatgactaaagaagaagctggaggttgtttgaaataatttaattataatttcaagaatttcctttggaattattttcttatttctattgataaaaaaaccacctaaatggtacaatagacttataaaaatataatggaacgttgttttcacagagtttattgacgacattaagtaaggtgattttttgaatgataaaaaacaagtaggtcagctgattcaagatctgcgaaagattgcggaaatgacaactgtcgagttatcagaaggaatttgtactgaagaagagctacatcgatttgaacaaggtgaaattcatgcaagcagtgaagttctctatcatttatcgaaacgcttaggggttccgatgaattatttctttgaagcaggagagctaacgcccaacgattattctaaagaaattaaatcgaccattaggcattatatacgaaaacgcgattatgaaaccgtgttacatatggtgaacaaagaaaaagataatcctatgtttcaagatccttttcatgcacaatttttcctatggcacgaagccatatgtgattattatattggaaataaatttgaacaagcacttcgtaaattggaaaaagctattgcgttcacgcgtacgagcgaacagttttattcagaaaaagagattgctattttaaatagtattgccattatttatgaagaagaaggtcatttaaaaaaagcgttcagtacgtttatggaagggttgcagcatattgctttgcttcctaaattaaaagatcctcttgtcaaaattcgaattttatatggattatcgcgtgcgcttttgcaaatggaacgttatgaaaagtcgattaaatatgcacaagcaggactagagctgtgtattcagcatgagacgctttatttattaggagaactgcactatcaaattggagaagcactctgtcagcttggtgagcttaaacaaggaatagcctacctagaaaaagctattaccgtttttgaaattgaacaaaatgaagcgtttgtgaccattattcaagaggagatgtctaaatatcaagaaacaaaaaagaagagctgaacgctcttcttttttttatctccaatacactgggtgtgggtaaaatggccgagggcgagggtaaaagtaaggggggtggtaataaatgggacgaggataagggtaaggataaaatggccgagggcgaggatacggataataaccataagggaatctttcgtcagtttcatgaggatttgaataataatcatagccatattgatactcttctaaaggttgttccgggtaatattgataattcactcttttcaccgcctaagtttttatgctttttactgtattcattacagaaagaattggagtatgtactcatcaaacttttaatttgaaaaaggcgggagacaaggagtattttgaaaataaaaacaaattagctttccttctcgttttcttataagttatcagcatcaggaagggtgggatgttcaaagcttttaataaaagaagcgtaagcaatcgtatctttaatagggtttacataagataatggttgacctcggtagctgaaattaaatgtaatccaagcaaaatctttattattgttggaaatcagttttgcattatgtataaaagcagatgcggcaatcatcgcatctgggcctttaatttttttattggattctattttagcttttcggcgaatttgagctgctagctgtgcaatttcacttgtaacgtctacaatcttatctgtcatatcgtaaatataatgattttttactgctttgacttgaggatttgtttctacttcccaatgcgacagaagttccatttctacaacggtaggcattaaaaattccgcattatttgaaataagttcattaatatattccacaacttctggataattaagcgcatgtgaagcccaaatgtttgtatcaatgattactttttcatccaacacaaatcgttcactcctctctactagccattcgtaccagctcttctaacccaaaaggtgagtaaagagccgcagattctgaaagctgattgcttaatagaagcttttcatatttagttaatctagtttttgcagattttatgagcttttcttgtgtgtcatttaatgttttatcttttttatcgtacgtgcgtagaactttattttgaggtttgtatttaagatttttcttctgcatagggggtgagggaggtaattgcggcgagggttgcgtataaattttcccatttatttttaggttaaagtgcttctgaacttccttgctgtatgttcctttttggtcatctaccaagcgctgtgctttcatgatatccctgccttttttataaatttatatagtatatgtgatgaagttttctcttactattccttttatataaaaagattaaaaaattagctaaaatacccctgctaaagagcaggagcaaaatagttagaaactattctatagcggatattaacaagaaatttgaaaatactctctatattttttatttactcagagcctagttctagagctgtgaatgtgtggcttgttacattgtcagggataagcgtaataccagatgcagcaattgtttcagctgtaggaggagtagcgccaaggtcaaacagtatagaaccttctgggaaaggacctaaattaatagttaaaaagtactcattttctcccttgtctggatcagtatctaccgcatgaatagaagtagtaatttggctaaatacaatactgagaaggccgcttcctaaaatttgcaatccgaaaattccacttgtatcaactttttcagaaatcaatacaggtctggatgatttgttgccttttctccaaattctaaaagttgctggaacagctataggaacaaaaattccagaaggtgataaaagacctgttaaaatagtaaggattattccaagtacatcacctaaatcctctagtgcaacacctaaatcaaaagccgcaggttgccaatttactgttgcatctaatactacttgatcacaataatcatcaacacaaacttctgttgttgcaattgtgcttgataataaattagggcgagcagttgtagtaactggtactgatggagcttgatctacatcaagttctaattcttttccatagtgttcattcttgtaatcatcaaacttgcagtggtgtttgtgttcctctttacaatcctctttacaatcctctttacaatcatatttcttaggatcgcctttaatatactttttgtcataatatgacataaactttcacctccgagttatttaagaggttttttaagcctcttgatatatataatgctagagctcaataagatggactaggttaccgtctaaaattgtaaaaaagggcttttggctagtccttctaactgatattgtagtgatgtctcatagttatttaaaactgcactttaataaaatttacagaagaaagtgcaatcgatacacttcgattttctctttcatagcctattacggtttcttctaatttaatcaacccattttcaaagttttttaaaacaccttcaaaaagcgcattgtcagtagcaacttccaaagtcattcccatagattgctgaagctgagattctaacctccacgaaaaattcacgataattcaccgtctttgttaataataatcactgaatgaatacttgctaatggaatatacacaaaatctttttctgcctgttttaataccacataattcaaagggattttaataacagacccagtttgtactacttctcccgttatagaaccaaaagcggtaacgatttctacatttaaatttatggctgtgataagcaatgcccgaaattcagaactttcttgtgctgataaaacttgtgccattctaaaccattcctttcatttttaatcatacatttcaacatattcaagaagccttctattgacagggacaaacttcctatactccaaaaaagggcgggattttaagcacatcataaaagattcacgattacttgtctcacctttcatatgcgattgcatatagtaaggtgaggtgaatataaaatgttatatgaacggactttaggactaattagcgtagtaataacctgtcataatatctcatcttttgttaaagagtgtttagatggtttattaaaacaaacgtatcgtaatatagaagttattttagtgaatgatgcatcttcagatgacacaagtagtgtaataaaagagtggatagcggaaaacgacccttcttttcatgttgaagtaatagagttgccccgtaacgtcgggtttgcaggtgcatcaacaattggctattttttaagcaaaggagaatatattgcggttcatgacggtgatgatatatctcatccggaacggttagaaaaacaagtatcttatttacaaaatcaccccgaaattgatgtgctagggtcaagctatgcttattttcatgatggtaattttcaagaattcaaaaaagaaaattggcttcgatatggaaaaaatattcgcgaattatatgcaaaaggcggacactgcgtatgtcatggaacgcttctgttccgaggtgaagtttttgacaaaataggagggccaacgcgcagaatcaaaggcgctgaagactatgagtttattgcaaagtgcttaaatgcaaagtttaatgtagagaacttacctgacgttttatactattatcgttttcattcaaaacagcgttctcaacaattttatagaaaggaagccgtaaaagatgagtaatgagtctctgcgtatactaatggttttagacagcatcgaagtaggcggcacggaaacgcacgtatttagtttagctaaagaaatgcttagaaaaggcattcacatagtcattgctggaaataaaggaagaatgatcgataaatttcatgaattaggctgtcccatctatgaagttgattttccctatacattaaatgtagaagaagaaaaaagaaatgagttaatcagccaagttgagcaaattattgaaaaagaaactatttctcttgttcatgctcaccaaactccttcagcataccttaccttttcagttgcaaaacaaagaaaaattcccactgtcttcacagtccacggcacgtactaccctaaaagtgaattactcaaagtagtagaattagcttcagccaccatatgcgttagtcctccagtctacgaatatgttcaagaagaaacatctgcccagccaattttaattgcgaatggaattgacacggaagaatacagtaatagggatgtgacggagttaaaagctcaattgaacattcctaaagaagcatttgttttattatacagcagtcgcattaattggacgaaggctaatatttgtatgatgctgcttcgggcatgtaaagatgtgaagctgtcaaaagctcctcaccttcacgttgtggtagtaggagacggtcctcgctttaaagatcttcaaaatttaaccgatttaattcatcgaacgtgtaaagattcgtttattcaccttgtaggtgaaaaacaagatatgcagcgctattatccgatagcggactgtgtggtaggaacagggcgagtagcgcttgaagcaatggcttgtacaaagcctgtgctagccgttggcaatcacgggtattttgggttgatagataaaaatgagtacgacgatgcgtggaattactatttcggagatcataattctcgccaggcgtgcagtcggtttacgttggctcgtgatttgggtacgattattgcttcttctgaacagcttaaaaacattggagttcagtcaagagaatggattttaaataaatttgacgtaacaaaagtaacggaagaattgatagagttatatcttgataaactaaaggatgagacaacatgaaaaaagtgctgtatataggctggattggctttgggaatttaggagacgaactgctttggcatgtatttaaagagctgagcgaacagtattacagtgaagatgaaattgaagtcactccgtcttttccaggagttgattttaaaaacgtagagccttacgatacggtagttttaggaggagggtcgctattactacctggttatcttcaagtcttgcaaaaagcagctgatttaggaaaagatattttaatttggggaagcggaatggactgggttgaaaaagaacagctggataaaatgctggctggagaaaacatttctttaggtaagctttttactgaaaaagatggagaactaatgaaagatgtttttaatcgcgtatcttttgcaggaataagagggccactcgctaaaaaagcattagaagcaataggagtcgattctgaaaaaatacgtattattggagatcctggcttgttgttaaattctaatagtatggtcgataaaaaagaaaaaatcattggcgtgaactggggaactacgtataaccgtttatatggaggcaatgagctagcagttgaagacgctctagcaagcgcgtgtaaaaaactgattcaacaagggtacaaaatagctatctaccttgtatggggaagtgataaagcttcgtgtcaaagactatttgataaaattaacgatccagaacatgtggtgtttgacgaaaaattgtataaagaacaagagctaatgactattttatctcgttacactatgaccattaattttaagcttcatgcgaatattttatctttagcagcaggcgttccatgcgtggcacttggatatcgttttaaagtatttgacttagcctattctcttggtttagaagaatgtgtggtttcccccgattctctaaccttagaaaaagatgttctgagtcgaatagcatatattgaaactaattatgatgatatcttgagtcagtataaagaaaatgagaatttatataagccttatttaatagaaccttttcaaaagaaaatattctaaactgtaaaaagcaagtgtctttgtaaagtacttgctttttacattacatatatttcttcatgaagttatgctagaaataacacagcagctaattttttgttagaataggaagagcaattgtaatgtttaccctcaatcaatccctcaaccactatttctacttattttaaaggaggacgcaattttgcaatttgaacaagctttaacacatttacagtcctattttggctatgattcgtttcgaaaaggacaggaagagtcgattcgttatgttttagaagggcacaataccgcttgtattatgccaacaggaggagggaaatcactttgttatcagattccttcattgcttttagaaggtacaacattagtgatttctccgttgatttccttgatgaaagatcaagtggacacgctgaacgcagctggtattcccgctacgtatattaacagctcgctgacgcacacggaggtgcagcagcgcttagaagaagtagcgctcggcgaatataagctgctttatgtagcgccggaacgactggagtctccacaatttttagaacagcttcaaatgcttcctatcccgcttgtagcggtagatgaagcgcactgtatttcacagtggggtcatgattttagaccgagttatttgcgcatcaatgaactgatcagcaagctgtctaacgctccgattgtgatggggctgacggctacggctacgcctcaagtgcgtgaagatatttgtcgagctcttcatattaacgaagagtacacggtgatgacggggtttgaacgtgaaaatttatcgttcgctgtggtaaaaggccaggatcgaatcagctatatcgagcagtatatccgtaaaaataaccaagaagcaggaatcatctatgccgctacgcgtaaagatgttgaagagcttcatgctagattgcaaaagtcaggagttaacgtatcaaaataccatgctggtatgaatgggaacagccgtgatgaagagcaaaaccgctttctgcaagatgatgtgcaggtaatggtagccacgtctgccttcggaatggggattgataaatcgaatattcgctttgttctgcactatcagcttccgaaaaatatggaaagttattatcaagaagcaggccgtgctggtcgtgacggacttccaagtgagtgtatcgtgctttattcacctcaagatattcgcgtgcagcgctttttgattgaacagtcaacgtcgaatcctaaaaagcaaattcaagatcttgaaaagttgcaaagtatggtgaactactgtcatacagaaggctgcttgcaggcgtatattcttcattattttggagaaagtgaagcgcatgagtgcggccgctgcagcaactgtacggatgatcgtgtggaaatagatgtaacggtcgatacgcaaaaagtattatcttgtatgattcgtatgggcgaacgtttcggtaaaatgatgattgctcaagtattaacgggttctcgaaataaaaaagtagttgattttggttttgataaactgaaaacgtacggcgtcatgagcgaccggtcggctaaagaagtgagcgattttattgagtatttgatttcagagcagtttattttagtaggacaagggtcatttcctactttatctgtagcggccaaaggaaaaggcgtgcttcttgggacggaaaaagtaatgagaaaagaacaaatggaagtgaagcaaattgtccaagatgacgagctgtttgctcatttgcgttccgttcgaaagcagctagcagacgaagccggcgtgcctccttttgttattttttcagacgatactcttcatgatatgtgtgcgaaacttccagtaacttttgaacagttcgccactgtaaaaggagtcggagaacaaaaacaagagcggtacggagaacgattcacgactgaaatcaaacagttttgtgaagaacatccagatcgaaagcgagaagtttcagcgcctgctccgaaaaaagcaagagcgtcatcaaaagaaggttctcacttaatgacgtatgagctatttcagcaagggaaatcgttagatgaaattgctgctgaacgtgaattgagccgcattaccattgaaaatcatttgtttaaatgcgcagaagaagaaaaagaaattgactggtcaccttttctttcagatgaagacgaacagcttattttagaagttgcttcctcagtaggcgatgaaaagttaaaaccaatcaaagaaaaattgcctgaaaatatcacttattttatgataaaagtagcgttattcaaacaaaaaatgaagcagctgtcttaaacaaaaagctcctattaaaggagctttttgtgttgagtaagcgagtttactgataaaatagaaggtataaatatttgaaaaatcagattacataaaaaggaggaatgaatgggaatgattgaacgagagattgaagcgattttgcatgcttctcacgacaatatcgttatcactgacgaaaaagggcttgttttacgagcgagtcaaaactgtcgtgatatatatgggcatgatgtctcagaattaaccggtcaaaccgtctacgaattgcaaaaacgcgggatattttcaccttccgttacgattgaagtgctaaagaaaaagaaagaagtacagctgatgcaaaaaacagaaacgggcaaagtggtaatggcaaccggtattcccgtgtatgatgaacatcagtgtatgaaaagagtcattagcttttcgcatgatttaacagagcttcagcgcttaaaagaagattatcagcagctcgaagtgaaaatgaaaacatatcagctagaagtggaagagcttcgtgaacagcagtcaaatgagatggtcatacgaagtgaatcgatgaaaaaggtatggtcgattattaatcgcgtggcagacagcgatgcaacggttgtgctactaggtgaatcgggtgttggtaaaacggcttttgctcatgctttacactatgggagtgaacgaaaagaagagccgtttattgaaatcaactgcggagctattccagctagtttgtttgaatctgaaatgtttggctacgaagcaggctcttttacaggtgcaagtacaaaagggaaaataggaaagtttgaattagctcataacggcacgctttttttagatgaaataggagagctgcctcttgatatgcaagtgaagctgttaaaagtgctgcaagaaaaaacagtcaccaaaattggaggtgaacgagccaaacacgtaaacttcaggctgattgtagccacaaatcagccgcttgaagaaatgatcaaaaaaggaacgtttcgcgaagatttattttatcgcttgcacgttattccgattaccattccgccgcttcgtgagcgaaaagaagacatcgcggcactgctttatcacgtgttacataaacaaaatgaaaaatataacatgaagaaattttttcacgcagaagcattaaatctacttcttgaacatccgtggcctggaaatgttcgcgagcttcaaaatacaattgaacgccttgtgttaattacagatgaaaacagtatctcgcctcaagacctcccgttttactcagaaaatagcagcagtggaaaagaagaatgggagactcttgatacgttaacatctcagggaatgacgcttcagcaagcacttgcagaagtggagaaaaactggctggttcgtgcttatcgtcagtgtcaaacaacgtatgaaatggcagatgtactaggaatcagccagcctacggtcgtaagacgtttacgaaagtacaatataaaataatgagattttaattcattatgaattaactgattcaatactgaatcagtttttttgttttgattctattgtgaattaaaaatcctccataattgcacgaaatagagtaataaaaattggcatgcattttgcattaataaaaagtatctaaataaaaagcgtcagtatctaacatgataatacggtgctaatgaatgaaacccactaggaggaataaattatgccaaaatatcagccgaaaaattcatttgaatctccgcgtttttgcggacctcgaacatttatgagacttccgtatgtagaacaagtaaattcagagatggattttattgtgacgggtattccatttgattcagggcagtcttttcgaacaggagcacgtttcggaccggaagctattcgagatttctccattttgcttcgtccgtataacccagaacaagagattaatatttttgattacatttcaggcgtggactacggggatttgtcagttgttcccggatatattttagaaacatataaaaaaattgaagaagggttaacgccggttgtgaatgaaggaattattcctatttcactaggcggtgatcattcgatgacccttggtgaacttcgtgccatcgcgaaaaagcacggaccggtagcgcttttacagtttgatgctcattctgatacgtgggatagctattttgaacaaaaatacaatcacggtacggtatttagacgagcgatagaagaagggttaatcgacgtgtcgcgctcgattcaaattggtatgcgaggcggtctgtacggcattgaagatttagaagatgcaaagaacttaggtctagctctgtatacgacaaatgaatataaaaaactgggcgttgaaagaatgctagaaattattcatgagcgtgtaggagaaggacccgtatttttatcgtttgacattgactttttagatccagtttacgcgccgggaacgggaacgcctgaagtatcgggtgcaagtattgacgatgcgcttcaatttgttcgcgggttaacaagtatagattttgtcggttttgatttagtggaagtactgccagcttatgatcatggtcaaattacagcagcggcggccgctaatattgtctatgaatttatcacgcttatcgcgttaagaaaaaaagcaaaagaagaagaagcgctgttagtgaaagcacgcgactaaatacaagcaaggtggtaaaagtgggaaggtactattatcttcccacttttatatacgagttctctatagggagtgtttgggtatgaacaggcaagcaaatgtaaaaatagataagaaacaggaaaaaacattaaaaagagaaattatcaatccagcgactaataagatcatagcggaagtgtgtgactcgtcgcttcaacaagtagaggaagcggtaggtaaagcaaagcaggcttttgaacagagtgaatggaagaaaaataagtcactgcgtgtagaggtgcttaataaactagcaaatttattagaaaatgaagcgagtgtatttgccgaaacagaaacgttaaatacaggcaaaccaataaaagaatcacagttagatatagaagatacgattaattgtttaagatattacgcaaatttaatagaagaaaatcagccgtggacaaagaacatgttcgacgacacaaacagtaaaatcattcaagaacctattggcctatgcgcgctgattgttccttggaatttccctttgttgcttggtatgtggaagctggctcctgccttagcagctggaaatacggtggtgtttaagccgtcagaattaacgccgctttcttttttaaagttagcttcactatgtgaaaaagctggtataccagaaggcgtgtttaatttacttacgggagacggtgaagtgggaagtgcactgattgaacacaaagacgtagctaaagtctcttttacaggaggatcagtaacaggcaaacgtatttatcagcagtgcgcaaaagagctgaaaagagtttcgcttgaactgggagggaaatctccccttcttatttttgaagatagcgagattgatattgcagtagattggacaatgtttggctcattttttaaccaaggtcaagtgtgtgtagcttcatcgcgtatactcgtacatgaatctatctataagccgtttctttctgctcttacggaggctgttgctgccataaaaattggtaaccccttaagagaagaaacggagatgggtccggttattagcaaggagcatctgaataaaatacagagttttatcaagctaggtcaagaagaaggtgcgaatttattaacaggaggaacgttaattgactgcgaaggtggcaactatataaagccggctgtgttcgtcggtgtggagcagcatatgaaagtcgtacaagaagaaatatttggtccggtcattaccgttcaatctttttcaagtgaagaagaagccatagtacttgccaacggtacgagatttggtttagctgcaggaattttaacgaatgatttaatgaaagcagagcgagttgctgaacatcttcaagcgggaacgatttggatcaacggctaccatacgcctcatattgaaacggcgtggggcggttttaaagaaagcggcattggccgggagttaggtccatcaggattagctgcttttactgaaataaaacatgtgaatacaaataccaagctagctcgagccaattggtatcaataaaagtgaaaggtggaaaaggaatgacaacaaaaagtggtctcgcccatgatgatgtgcagccgattgcaatgaataaaagaagtatgggcttcttctctacattttccatgtggataggagccaatgtggtagtaacgaccgtttttaccggaatgctgtttgtacccgatatgacatttttaaaggcattatttattattgtgcttggctctttagttggtgctataccgctcgtgttgatggggaatatcggaactcgcaccggtcttccaaccatggttttaatgagaccagcttttggacaaagaggggctatgcttcctgctgctgttaatcttattacactgatcggctgggcgtggattcaagcctacatggcagggctaagtttaaatcatgccgtcatctttttgaccggttacagcaatatcaatctatttacgattcttactcaagtactagtagtagcgatttctatatacggacacaaaggcattgaagccacggaaaagttagtagctacgctaatggtcattttagcaaccgttgtgtttagctatttgtttatcgaatttgatgcagcaaaattaattcaaatgaaagcaagtgaaaatcctggtattacaggaatgttagcttttgatatcgtagtagctacagcttttacgtggattcctattgtttgcgattataaccgaaactgtaaatctgaaaaaacgggaattgcgggaacgtatttagggtataacgttgcgacattaattgcgatgggattaggcgcaacggtttccggcttttcaattctcggaaatatgacgcaaacgtatgacccggtaaatttaattggcgcatatagtccgctgttaggattagtagcagccatcgtcatttttttatcggtgttgtcaaccaacgtaatggtattgtatagcgcgacaatgtcttatttatctatttttccaaagcagaggttctggataccggcactaaccatgggagttgtcacagtcctgggttctttattaaaagagtggttaatgacaaattttcaaagctttttgcttatgatcggcgtattatttattcctattattgcgattgttcttgttgattattatatcattcgccgaaaacactatgacgtttcagctattttagaaaaacaaaataaactgtactggtatacaaaaggatttaacctttatgtgtatgtatcttacatagtgggggctgtatttgcctactattttacgtacgttcacccgctagccacaggcgcaacgatcttagcttttttatttacaggtgttttgcatgtatcgctaaccaaactttcacagctttcaatcccttattcaaagggaatcgacaaaaatgcttgacgtatacttaaaatagactgaattatctaaaaaataagtgtcggaaagctcctttaaataggagctttttgtgttgaatagagggtaaaaaagcaagcagataaaatagacgagaaataagtaaaagcaggaagaagagagcttattaatccagcctcaaataaagtaataacatgtatttgattctctcagaggtctttcctataataaatgtaggaaaactttccaaaggagaattttatgcttgaattagaggctattcaaagcagggccattgaaaaaactaaacatacattactacaggatataaaaagcgtactaggtgaacaagacgaatgtccgaatttagagacgtatttaacagacaggcattcttttattaagaaagcctgggggactgcgtggagaaaaattgctgtttcttctgtatctaagaaaaacagaagatcgtatttaacagaaagaggctttgagataaaaggatataaacctcaagctatcgataagttatttgctaaagaaacgagaaaaggtatggagtttgatgctttttcttggttaaaagagcaatacggaaatggcaataaagcagagtggctgtctctatacggagaagcaagagctgaatttgccaaaaaagaagaagaaagaaaagagaaagaaagacagcaaagtattaatgatcgaaaagccaggtatcaattacagttaaatttagaagcggctcctattttggaagtaaacaaagagctgtattatctacatataagagaacagctttcacatcagctatcaaaagatattgaaacaaactcaaaatatattgaaaactatgcgccgcatactgagcttgaagatgaattaatagaaaacggtgatttaacacgtcatgattatgaaacggttcatgacttttttcaagagctcaccggcggcgtaagctcagaattagaccgatactcaacgattatcttatttgaaacgtatgaagatgtatacgaggtatttatcaccgataagatttatgaaatcattccaactatgattatggatgaccttcctgcttcatttaaagaagaatataaatcctatacaaatgcttcggtaacacgaatggacattataaaagcacttagaagtgatttatcggatttggtctatgaatataaaagaatgcttgtagaagaaaagctttcccatgtactagaagtttcagatcacaacttaacgatcgaagagcatcaagagagatatcaacagcagctggaagaaagaagattacaacaagaacgtgaacgtgaagaaaagaaaaagctgattgaagaagaacagcgacagttaaattatatttttggtgcagaatacgaaatggacccaagaaaagagacggaatacattcttcatctcggtgatacaaacacaggaaaaacgtatacagcattaaaatcattaaaaaaagctgcttcgggtagttacttagcgccgcttcgcctgttagctttagaagtttttgaaaagctgaacaaagacggagtcccttgttcgttaaaaacaggtgaagaagaaaagattgttgaagacgctcagcacatggctggtaccgtagagatgtttagtgaattagaacatggcgatgtaaccgtaattgatgaagcacaaatgattcaagacagagaccgagggttttcatggtataaagccatcactcgagctaatgccaaacaagttcatgtgattgggagtttaagcattcgaagtatgttagaagagatgcttgacggtgtgatctcagaaattcatgagtatgaaagagatatacctttaaaagtagatcttcgaaagttcaaaattgaacaagtgaaacccgcagatgctttaattgttttctcgcgtaaaaaagtgctccagacagcggctaagctagaaaaagatggtcataaagttagcgtgatttatggaagtatgccgcctgaaacgagaagaaaacaaattgagcagttcattaatagagaaacaaatgtcattgtgtctacagatgcaattggaatggggttaaatcttccaattagacgaattgtccttttagaaaacatgaagtttgacggacaaaagaggagattgttgacttctcaagagttaaagcagattgcaggtcgtgctggaaggaagggtctctataatgtaggagaagttgcattcgctaaagatgcaaagcaaatgagagaactgttattttcaacagacgagcaaatcagtaaattttctattgcgcctacttcagatatgctaagaagatttaaagaatatcatcatgatctcggaacgttttttgacatgtgggctaaatttaaaaatccaaaaggtacacaaaaatcaaacctggcacaagaacgtgagctttatgaggaagtgaaagacacgctgattgaggcgaaaatgccgattgttgatttatatggctacttgcagctgcctttttcagccaaagaaagttctttgaaaaagcagtgggtggccagcatgaatgcgattgttaacagagaagagttacctgaaccaaggataatagaaggttcactggaaaaattagagctgtcttataaggcgattggcctgcatcttttatttctatatcgaatggacagaaggccagaggctatttactgggagcgtgtccgagaagagcttaccgataaaatccataacgtattaagaaaagatatgaaaaaatttaaaagaacatgcagtgcgtgttctaaagaccttccttggaatcatgatcatgcgatatgcgattcgtgttttcataaaagattccgcagaagatatggggacgaagattttaattactaagatgtagagatgaaaaagaggcttgtataaacgtattttagttaaagaaaggtccgaacgagttggatttttgattgagaatccaattggttcggctttttttatggtgaacgtagctttcatctgtttcgtttcttctagcacagttgattggagggcaaggcgaagactcctgccggaaaagcggaaggggtgagaccccgcagaagcgtaagcgacgaggaggctcagcggacgcccgcggaaagcgaagtcttgcacggaaatcaacagcggtgtactaagcagtccagttcatgtatactatttgttcatctttagattggattgatgtagttatgtctcaatctgatttttcatacaggcttttaatctttttcctgcgaatttctgcatcaaagcagatttttgtagaaaaaaccggaaatgtataagcggtcatcttgtaaaaagatcaataaattattatgatatagagtggaactgatattttaaagagttccgtgatttttttgttgggcggacgtgtattgtattagagtaagtttgctatcattcattatgttaaaagcagcacttttaaatagagatacggttcgtaatagaagggaagaggatgatgacaagtcataacaaagaaaacaaagctgcagtcgagcagtatagcaaagggaaaattttgtggcaattaacccgtcctcatacgctaacagcatcgtttgtaccggttttgattggtacagttctagccatgttttatggccatgtgaacgtttggatgtttcttgcgatgcttttttcatgtttgtggattcaaattgcgacgaacttatttaacgagtactatgattttaaacgcgggttagacacagaagactccgtaggtatcggaggagctatcgtcagacacggaatgaaaccgaaaacggtattaaatttagcactgatttcttatggaattgctcttattttaggtgtatatatatgtgcaaacagcagctggtggcttgctttagttggattagtaggtatggcgattggttatttgtatacgggcggaccgcttccgattgcgtatacgccgtttggagaattattttcaggtctttgcatgggtgccatgttcgttttaatttcattttttattcaaacaaataccgtaacgtctgaaagcatctttgtatcacttccgattgcgattttagtaggggcgattaatttgtctaacaacattcgcgatatagaagaagacacaaaaggcggacgacgtacgctagctattttattaggttccaaaaatgcgattagatttttagctgctttgtttggcattgcgtatatttggaccgttgcattagtggtattcttcggtattagcccttggattttcttagtgtttcttagtgcacctaagccaattcaagccgtacaagcatttgtacgcggagagcttattgcgatgaaagcaactgctcaaacaaatacgttttttggatttactttatcaattgggttattaattggctatttagtaagctgatggagtggaaaaagcctgtctttaaaaagacaggctttttgttatgctctagttattttttcttttactgagttaataaatgcgttcatattttcagaagatgaaaagctggcttgggcttgttttggtccgccgccgccttttccaccgtaaagtggaagaagttctttataaagttctccgcattttacctcactgccgctgtgggccagcaatactttttgatcacttgaaaaagaaaaaagaagcgttgtatcaggcgtttgaagcagctgctttgtcaaagcttgcacatcttttaatgtacggttttcaaagtgatggtacagaaatgatccttcttttttggcttctaattcacttgctaaataagctgcattttcattttttaattcttctagttgtttttgcagctctttttgttcagtctccaattttttaattcgttctacaactaactcacggcttgtactgaatttattgctaagttccgctacgatttcttgagactgctgataatcagctaatgcacgcataccgcatttaaaaaagaggcgtgtattgccgcgctgcttttctgtttttgtaagtttaataaggcccagttctccaatttggttcacatgagtgccgcagcaggcagaaacatcaatgtcttcaatttctacgatgcgtacaatttcgtcttctaggtcgggcactttgcgaagcgcaagagtatgcaaatcttcttttttcacttcgtacgttttaatggggcggttgctgtaaatagcgtcgtttacaattttttcaatgtgtaatagctgctcatcagataactgaggcacatttaaatcaatagagacagcttcgcttcctaaatgaaagctaacggtgtgaatatcatatgtatcaattaatagagctgaaagtaagtgctgtccgctgtgctgctgcatatgatcaaagcggcgattccagtcaatttcacacgtgacgttcgtttgtgcagggagcgtatcaacgaggtgatagacttctccattttcttcataaacatcttttacctcaattccggcaatagtaccgtaatcagaaggctgtccgccgccttctggataaaaagcagtttgttttaacgttaaagcgtagccatttgaaagagcgcgcgtctctgtcacttctgtttcccacgtttttgtgtagggattgctataataaagtctttctgtcatgttcatcatcctttctagtaaaaccatacctaactttttctatagtatcagaaatatgtttcttcgaacatggataagctaacttgtaataataaaactgggtgggacatatgaaaaatactgtttatatttatacgcgggatttaaaaagaattttcaccaattgggcgatgattatcattgtgctgacgcttatgattctgccgtctttttacgcatggtttaatataaaagcatcatgggatccttacggacggactgaaggtattgccattgcagtaacaagcgaagacgaaggtgctacgataagagggcagcacgtgaacgtgggaaaagatattattgcaacgctaaagaaaaataaaacgcttggatggacgtttgtctccaaagaaaaagctgatcacggagtaaaacacggagactattatgcaagtattgttattccaaaagatttttcacaaaagcttggtaccgttcttcaagaccgtttggaaaagccggtcattatctacaaagtaaacgaaaaaataaacgccgtggcgcctaaaattacaagcaaaggagccagcagcttaacacaacagatcagtgaaaaattcgtcaaaacagcgaatggagctattttttctgtgtttaacgaactaggtattacactgcagcgggatttgccgactattcaacaagttgaacaacgaatttttgagctcgaaaatcgtcttcctgaaatcaaaaaagtaattaatgaagcgaatgacaccactcaaaaagctggagctattgtatcgaaagctcaggctgctcttcctgaagtagagagattaacagctgacggcgcacagatgactcagcagctcaatacgtttttaactaaaagcgatcaagttttaaaaaacgctgagccaacgatcaacgaaacgctgcagcgggttcagcagcgagctctcggggttcaagaactgaagaatcagctgatggaaaaagatatcgcaccggctgaagtcagcgcagcagcagaacagctaaaagtgcagttaacaaaacaaattgctgacacaggagagattcttacgcttcttacagatttaaatgcgttatctcaacaacaagttctttcacctgttattaatgacgtaaaagatgtaaacaagcttttacagcagcagctttcggatgtaaacagtctgcagcaacaaacacaaaatggagatgctccaactcaaagcgtgcttgatagattcagctcacgcaccgaccaagtggtttctaaattaaatacgttaacgaattcgtattcttctacgattgtgccggctgttgaacaagcaatcaaagaggcaaaagataaaacggcaagcgcaaactcactgcttgaggaagccaataaaagcatgccggatgtttcgaatgtgctgtctaaaacagcgagtggcatcttgcttgggcagcaggagcttgcgaaaataacaaaagactttccgcgaattgaacaaaacgtgcataatatagcggataagatacgagaatttcagcgaaaagaaaatattgaagatattattaatttgttaaaaaacgatgtgcaaaaagaaagtgatttttttgctaaacccgttcttttaaaagaagagaggctttatcccattccaaactacggctcggctatgtcgccgttttacacaacgctttgcttgtgggttggggctttgctgttagtttcgattttaagcgtagaagtagcggatgaagagcggtttaaaagctatgaagtctatcttggaagacttttaacgtttttgtccattgctcttgtgcaagcttttattgtgacgctgggcgatttatttttaatcaacacgtacgtcgtagataaagtgccttttatctttttaggcttactgtgcagcttcgtatttatgacgattgtatatacgcttgttgcgatatttggcaatgcaggaaaagcaatggcgattgttttacttgtgcttcagctttccgctgcaggcggtacatttccgattcaagtcgtgcctgctttttttcaggcaatcaatccgtttttaccatttacgtatgcaataagcatgatgagagaagtggtaggaggcatgttagcggacattgtcagaaaagacgttaccgttcttctttgcatttggcttggcgtgctgcttgttggcatttttcttcataagcctcttagtaaaacgagtgcaaaattaacaaaaaaagcgcgtgaaagtaaattaattcattaaaagacctttttaactttccagacagaaaaaaatgcggtagtgtagatagaaaggagtgatcagcttgggtatattagatggactattaggaaatgcatcagaagcagatataagaggaactgaaaaagatttacaaaacattttaattgccaacgagcgagtggaacaagcatataaagtcattcgcgatttgatggtgtttacgacgaaacgcttaattatcgttgataagcaaggagtgacgggaaagaaaacagattatcattccattccttataagacgattacccattttagcgtagaaacggctggaacgttcgatttagatgcggaattaaatatttgggtatcgggttctagcgcgccgatctcaaaagaatttcgtaaagataaaagcatttacgacgtgcaaaaagtattagcatcttatgtattagattaaaaaagttgagccatgaaaaattggctcgactttttttatgcttgtgtaaaacgggaagagataatatcttctttctcgcatgcagctgtttaaaaaataatcaggttgttgtccttctacatttgtttatgtcactcattactgaaatgcatgaaaacgatttacataatgaattatacagaataaaaaaaccgtgatatgctttttttagagaaaaaaggaagtgactaactgtgagttataccgtaattggaacatcagcttttcgcaaaacaaatgttgcgctttttgcagcaggcttcaacacattttcgattttatattgtacgcaggccattttacccgaattttctagagaatttgggatatccccggcgtttgcgagtttatctctttcgttaacaaccatcacgcttgctgttagtatgctttttttaggttctttatcggaagtgtggggacgaaagaaactgatgggcctatcgttaatttttgcgtcattgctatgcatcatgacagcatttagctctacctttgaaacgctgttaatttttcgcgttattcaaggaatcgtgttagcagggctgccttctgtggccatggcttacttaggagaagaaattgaacccgggagtttaggaaaagcgatggggatttatataagcggaaacgcctttggaggcgtagcgggaaggcttatgacaggaatgctcacggagtattttaactggtcggtagctcttgatgttgtaagcgtaattagtttattggccacatttgttttttttatgaacttgcccgattcacagaactttacttccaggtcctttgaacttcgtcagcttaccggctctcttcgcagtcatcttcaagataaagggatgctttgtctttttgctattggttttgcactgcttggaagtaacgtagctttatacaattatattggatacgctctatccgctcctccgtattcttggaatcatacgcttgtcagttttatttttgttattttctttgttggagtattcagctcggtctggatggggacgctggcggatcgatatggtcggaagaaagtgctgttatgtacgattgctgttacgcttataggttcaatcgttacgctgcatcccgttttatggataaaaattaccgggcttttgctgctgacctttggcttttttggaagtcattccatcgcaagcagctgggtaggaagaagagcaacgcatgacaaagctcaagcttcgtctttgtatttgtttttttactatgcaggatcaagcgttggcgggacggtggctggcttatgctggagtgcgtacggctggaaaggtgttattgctttaattggtgtgtttcttacaacagcctttttcctagctgttcgtttgtcaaaaatgccggctcagcagacgcatgttcactaagaaaatgtaaagacatatagctattgatttaaaaaaagaggcccgtacaaaaggattttagcccaagtgaaaaacgaaccatcgatcaacatgtttgattagtggttcgtttttttttgttatggtgaacatagtttcatctttttcgttccttctagcagttgattggagggcaggacggagactcctgcgggaaagcggaacaggtgagaccccgcaggagcggaagcgacgaggaggctcagcggctgcccgcggaaagcgaagtcttgcacggaaatcaactgcggtgtcgcaagtgatttatactagctactttagtctttagattgaagtaatttagttatgtcttaatttcttttcttagtttaaaagttgaataaaaagctccgctacttttttatgagcgctgttagcaggatagatataggagaaacggcgcttaaaaggagcggtgttaacgtcgagaatcgataggtgtttttgttctacatcttctttaatagcgcaaagcgacagtacagacattcctaaatcgtgaacgatggcttctttaattccttgattgctgctgatcgttagtatgcttttcatttttaaaccgttggacattaaaacgtgatctaaatattctcttgttccagagcctttttcacgtgctacccaccgctgattttgtaaatcatcaatttctacttttttaagctgagctaaagggtgatccactgacgcaacgatggcaagctcatcgtccataaaggactgaatatgtaagtcggattcttccgtgtgtccttcaataagtcctacgtctactttgaaatgacgaacaagctgagcgatttcctttgtattaccgatagtcacttctacatcaatatcaggatattgttcacgaagctttgctaaaaatgaagggagaatatattcgccaatcgtgaaactggcgccaatcgttagcattcctttgacacggtgatgatgttcataaatatctcgtttcgtatgctcatatatctgaatcatttgtttagcacgatcgtataaaatttcgccgctgggtgtgatttttaacattttaggtgaacgcaggaacagggaagtttgaaattctttttcaagatttttgatgtgtacgcttacgcttggctgtgaaatcattaacttttccgcagcttttgtaaagctttgctcttctacaacagaaacaaacgtctttaacgcatcatagtacatagagtatggctccttttatattaaaaaaattaattataaacattataaaacattactattgtaataactagaggtacttggttaaggcaaacaagacgaggtgctgtcttaaaggagtgttttggcttacaacgaaggcggcctgcgcaatttgtttacagtnnnnnnnnnnnnnnnnnnnnnnnnnnnnnnnnnnnnnnnnnnnnnnnnnnnnnnnnnnnnnnnnnnnnnnnnnnnnnnnnnnnnnnnnnnnnnnnnnnnncctggggggtgataatctcagcgaataccggacaaaggtttaaaaacatgatatcgtgtaagagaataaatcagtatcggttagagaaggaactacaaaaaggggatacaaaatgaaaacagaaaaacaaaaaatgctggatggagaattatacctttccgctgatccgcaattaataaaagaacgtgaaaacgctcgaagattaacaaggctttataaccaaacaacagaaagggaagaagaaagacgtacaaacttattaaaagaactgtttgggtctacgggaaattctctttgcatagagcctactttccgctgtgactacggttctaacattcatgttggagaaaatttttatgctaactttgattgcgtacttttagatgtatgtgaaataagaataggagataattgttttcttgcaccaggtgtacatatctatacagcaactcatcctttgcatgctcttgaaagaatttcaggagctgagtttggaaaacgcgtagaaataggaaataacgtctggattgggggaagagccgttattaatcctggagtgaaaataggcaacaatgcggtaattgcttccggtaccgttgtgacaaaaaatgttcctgataacgtggtagtcggaggcaatcctgcagttataatcaagcatattgaaaattaaagaataaacaaagagcttttgaattgtaaaagctctttgtttatacgatgttttattgccgatttggctcgttctcatttataatgttttggttaaatgtaaaaatatacatatttccttccgagatcatccatactttattgacaaaggaaaattaatcgtggtatattatctttaattaaagatattcaaattaaagataaatgacgaatgataaactagacgatttatccggaggaatgtagaatgaaccacttaaaaggaatacaccacgtaacggctattacaagcagtgcagaaaagaattatgaatttttcacatatgtgttaggcatgcgcttagttaaaaaaacggtcaatcaagatgatattcaaacgtatcatttgttttttgcagatgataaaggtagcgccggaacggacatgactttttttgattttccaggtattccaaaaggttttcacggaacaaatgaaatttcaaaaacatctttccgcgttccaaatgatgcggctttagactattgggtaaagcgctttgatcgcttagaagtaaatcatacggggattcaagagctatttgggaaaaagacgctttcgtttgttgattttgatgatcagcagtatcagttaatttccgatgaaggaaatcaaggagttgaatcaggcactccttggcaaaaaggccctgtccctcttcaatacgctattacgggactcggtcctatctttattcgtattgccgagtttaattactttaaagaaatgatggaaaaagtccttttatttaaagagattgctcaagaaggagatcttcacctattcgaagtaggagaaggaggaaacggtgcgcaagtagtagtagaatacaatgaaaaacttccgcaggctcagcaaggttttggaactgttcatcacgttgcttttcgcgtagaaaatcgacaagctcttgaagagtggattaatcgaatgccaagcttcggtttccatacgtctggttatgtgaatcgtcacttctttgaatcgttgtatgcaagagtggctccgcaaattttatttgaatttgcgacagatggaccaggatttatgggagatgaaccttacgaaacgcttggagaaaaattatcactgcctccgtttttagagccaaaacgtgcagaaattgagaagctcgtgcgtccgattgatacagtaagaagtacaaaagagtttgtaaaagaatagtacacaaaaaacactcaaatagctatttgagtgttttttgctgtttcaaagatgaacaagctttcaaaacgctaaaaaagaacgtgtttttgatattttctacttttatatatacctgtcgcgaatgtttgcttaaaaactgccaatgctctacaaggaaggagtaggagtgggttgtgcatagccttctttatatttttcatcgatgtctttgcggatatcttttattgatttgcctcggttatagtcgagcatagctttagctgcaatttctatacacaatccgcactttgttccatgatcatcccagacaactgctccgtttcttttatttttaaaaataaagcagtcatagctgtttttgtgattcgcttccatgccacatccgcagtagcaagggattttttcaagcagttcacgatttttagcaacggatagataaactagtttcatatctttaggctgattcttcaaaaactgtggcaaaacatctgctcccggagtctcttcgcgaatatcagcaactgcagctttgtgatgttcatgacctgaatgtgcagaagagtttgtggcagaagaagttgttgtattgtttgaacaagcggataatccaatacttgtagcgagaatccccaataaaataattgattttttcaatacaattaacatcctttcatgtgaaaataaatgatagttgcatcatacacggcagtttatctatgtagataattaaatacctgcttgtttatatctaattctctataagtatgcagagcggttatcgtgtatgatagagatggacgaggaaaaaatatgaagcatgaatttatcataaggtgcgttttgtaagtaattggacacaaggagaaagtgaacggaggttaaatagtagtgagtgaacaaaatcaacgtctttttgaatatattttagaaaattcagcctctatcagtgaagaatggctgcgccaaagaagtaatattaaaggatcgatttactcaaaggacgcagattcttcagttgagaaaaagctgcgtgagcagcatctttatacgattgaaacaattgcgagcggctttcttgacgatcaaaagatttttaagcaacgtatggtgaaatggacgacggaagtagtaaacagtagaattaaatttgatacgccgatttacgaggtagtagaagcgctaagcaaaacaagaaaaattatttggacgtatgtcaaaacatatagtctgatacattcatctattacaaaagaagatatactgtcttggagcgaagtttatcatacaacatttgataaactcattaatgaattctccgaacagtattataaaatcacaaggcaaaaaataagtcttcagcaagagctaatcgacgaaacgagttttcctgtcattccaattgtagatcacatcgcggtcttgcctttagtagggcttattgatgaaatcaaaggtgattctattatcgaggttgttccaaaaaagtgtgcagaaaaacatataaggcatctagtcattgacttatcgggtgtaaattatgtagatacgtatgtcgctcacaagttttttgatttgattaacattttgcagctgctaggcatccatgcgattatgtcaggagtgagtcctgacatggctcagacggctgttaatgtaggaattagttttaataaaattgaaacgtttggacatttacaccaagctctctcttcgcttggtgtaaagaataaagtatagaaatactaaatcgaaacggaactgagacctttgctctccagttccttttctttttgtttgtctatattctgctgcattcaaaatcttgtaagcatgccttacaaactccttttcatatggggacaaatggaagatactaaggaacaaataaacggcggttttctatgccaaacgtctcgtttagctcaagaatggaggtgtaaagagaagaataagagaagtatataatgagatagttaaagtgttagataagtactgataagccgtgtgattaaggaggagttctatgaaaataatttatcttctttgcttacttccgtttgtaggaatattaggtttattgccttttgttaacaaagtaacgccgtttattttagggatgcctttttttctcttttggattgttatgtgggtaatccttacgtcttttattatgggtattgtgtacaagctcgatcctgctgttaaaggaggagataaataatgaataccgctctgattattatttttggttttttacttttagctatttatcttggaattcgagctacgcggggcaaaaaaatggatttagaacagtggagcgtaggcggcagaggttttggaactgtttttgtcttctttttgatggcgggtgaaatctatactacttttacgtttctaggaggaagcgcttgggcatatggaaaaggagggccagcgttttatattttagcctatatttctttagcgtacgtgttaggatattggatcggcccgcaaatatggcgatatgcgaagcagcataagctcatgtctcagccggatttttttgtttcaaaatacaacagcccgtttctaggcatcgttgtttcatgcgcaggggtgctggcaattgttccttatattattttacagttcaaaggcttaggtattattgtatctgaagcttcttatggctctatctcttcaaccgcagccatttggattggagccatatcattaacggtttacttaatgatatcaggcatacatggttccgcgtggacggccattgttaaagatattatgatttttattgtcgtcttatttttaggaatatatatgccgttccattactacggaggcttacagccgatgtttgaggctgtgcatcaagcaaatccaacatttcttactcttcccaagacaggtctaagtatttcgtggtttatttctacagtcatgctgaccgtattaggattttacatgtggccgcatacgtttaatgcaacgtattcagctgaaaacgagaatgtatttcgaaagaattctattataagtcctatttatacgttaatgctgctttttgtcttttttgtagggtttactgctcttatgcaggtacctggactacaaggcgcagaagcggacttgtcactgcttcgtctttccattcaaacatttgacccgtggattgtcggctttattggcgcagctggtttattaacagcacttgtgcctggatcaatgcttttgatggcagcttctacgtcactatctaaaaacgtttatggcgttcttgttccctcagcgacgggcaaacaaatttcgatactggctaaatgtttcgtaccggtcattgcgcttgtttcagtctattttacacttcatggaggaaatacgattgtaacgcttttactaatgggctacagcattgtgacgcagctgtttcctgcttttatttttagtttaatgaaaaacaatatcgtgactaaatacggggcatgtgcaggtattgttgccggcattgcgtctgtgatgtatataacgattactgaaacaacgcttggcacgttgtttcctgcgttgccacaaattattaaagatacaaatgtcggcgttatttctttatttattaatttagttgtattaatggtggtcagtttagcaacgaaaaaaatcgccgcacagccgcattttgaaagcggggcagtagatggaaaacaaattttgtgaaaatctttttccaattgcgttttaagaacatcatgaagggtataaaagtagtgcatcatcaaaatgttcaatatggctgcaagacataagcagccttctcgataaaatgtaacgattgtgttgtttttaaacttaaacataggtaacaagtgtgaaaagcaacaagacgtatgccacaagcggtgtacgtcttttctatgaaagatatttacctaaaaaaggagatgataacatgacatctgaaaaagcatttgagcaaaagaaagatcttttaatgaatcaaattattgaatcgggttactttaaagcagaagacgggagacatttgtacgaattgaatttaagtgaactagaacaaacgcatcacgatcttcaaaaccaaaaaataagagaagtataattaaaatcttccagattattagaaattcagctgatttcgtatatgtgtgtaaataccagctgttcagtttgttcctccgcggctttttgtttgaaagcaggcacttttctttttcttctggtgcgtttacagcctcgctatttccaagcgtactcctcaagcatataactcaacacttaagaaataggcgaataaaaacaaaaaagcgcagaagctgcgctttttttgatgcgttaaaaacgagtggaagccgctgtttttttaggtttgctcattgctttttttagtacttcagaaaaataaggctctccgctaggattttgctgtcttagcaagtcaatggttcctttcacgtcatccatagctctgtgagcgtgctctctctcaatattatgatgatcaagaagcgttgttagttttttattaggaaagccgtactctttccatttgacagcacgcatagagcagtgccatttttgattagataaagatggataccgttttaaaagaaaactgcgatcaaaagaagcattatgagcgatgatagccgaaacgctagttaacagcgattccacttttttatcgtctaatgttttatttttaaccatctcatttgtaattcccgttaagtttgtaatgtacgggaaaatgggagttgaaggcatattaaattcttcatattcttctacaatgtcgattatttctccggtagaagaatcataagaaacaacagcgattgctagttcgataatatcgcatgtttgcgcacttaatcccgttgtttcaacatctaaaacggctgctagtttcacttgttcagttgacaactcgtcgccctccctttctatttatcattctattagcttatcattttttaacagaaaatgttagtaaaaaagatgagggagcacgtacatggatttattttatacgtccgcgtggaaaaggaatttacttttttaaaggagatgacgattgaaaaggagaatagtaatatttactcatctaaattaagtcttcattgaaaataatgaaatgaagaaagaaggggatcgttatcatgcaattgctgtatatggtactttttcttgtcttaattttttggggaattacatcttttattcattacaggaatcaaactattaaagttcgtttggacaagcattatacgaatgcagtagaatggattgaagctgttaaacaagagctggaaaagaaagggaagtccgtgagttatgaaggggatttcttgtttaaaattgatgaaaaaccttatgaaatcgcagcgcgcaatatgtctatttggagcatgtcgctctatcatatcttgctgcagcgtcaaaaagaacattcttaaatttacttgcatacagaaattatcacttctcgtctattgagaagtgatttttttatctttctgtatccataatnnnnnnnnnnnnnnnnnnnnnnnnnnnnnnnnnnnnnnnnnnnnnnnnnnnnnnnnnnnnnnnnnnnnnnnnnnnnnnnnnnnnnnnnnnnnnnnnnnnncttcatatatttttatatttggttatcgatttggcatagaatttgcatatgtaagaagggtttatcagacattttaattgtcaggcaaagaaaactagttacatactataaaactattttacattatctactagaattaaaaaattttaataatatagtaaaatgtagttgaccttcctagttttagaatataaaataaatcttgctaatagtttgaaaattctaaaatggaggggtttacttgaaaagctggaaaaagattttggggacatcttttcttgccacaactgttacattaagcggagtggggccagtacttatgaatggaagtgctgcttcagctaaaaccgcacaatcggaggaacttccaagttcaccaattgatatgaatacagtaccggaagaaagattggctaacgcactgaaaaaccaaggagttatttctcaaagtgcaacaccgcaagaagtgaagaaagccgttacttcttacataaacaaaaaagatgcacataaagagagcatgaagggacataaagctagcaaaattgatttgaaagcgaaagaaatgcaaacaaaacaaaaagaaaagtttcaacgaggcgaatttgctaatattaagtctcaaggaaacaagtcggggaacggggtaaatgttaaacctgcagctcaggcaaactataaaggacaagtgagaaaagataaggttcttgttcttttagtcgaatatgcagactttaagcataacaatgtcgttcaagaacctggctacatgtatgcaaaagattttaaccgaaatcactatcagcaattaatgtttggaaagaaagactttacgctatttaacggtaaaaaaattaaaacgtttaagcaatattatgaagaacagtctggaggtagttacacagtagatggaacggtttctgactggttaactgtacctggaaacgcaaaagaatacggagcagacaatccagcgggaggaaacgataatgcgcctggatctaaagggcctcgtaatcttgtaaaagaagcgcttgctgcagcagcaaaaagcggcattaacctttcagattatgatcagttcgaccaatatgatatcgatggagatggcaaccgcaatgagcctgacggcatagtggaccacttaatggtcattcatgctggaactgggcaagaagcaggtggaggtaaactaggaaacgatgctatctggtctcatcgctctactttgggacaagtgtataaagttcctggaacaaacatggctgcttatgattatacaattgaaccagaagacggagcagttggcgtttttgctcatgaatttggccatgatttaggtttgccggatgagtatgatacacagtatacgggtcaaggtgagccggtaggcgtttggtcaattatgagcggagggagctgggctggtgaagtagctggaacagaaccgacaagtttctccccgcaaaataaagagtttttccaagcaaatatgggtggaaactgggcaaatattcaacaaatcgacagcaaaaacattacaaaatcgggctctgtgagcgtggttgatcaaagcgtgacaaaatccaaacgaccgggtattgtgaagattaatttacctaaaaaagctgttcaagggattaagcctgagtttggaagcaactactactacagtaagcgcggagacgatctgcatacgacaatgacgacgccagagtttgatttaacagcggccaaaacagcgacgttcaattataaagcgttctatgaagtggaggcagaatacgattatttatatgtaaatgcgattcttcctgacggttcaaaagttctgttagatacaattggtgataaagcgaataatgcagacggttctgctgaaacttccggcggaaaatgggaagataaaagctatgacttaacgcagtttaaaggtaaaaaaatcaagcttcaatttgaatacgtaacggacggaggacttgctcttcaaggatttgcacttgataatgcaagtttagtagtaaatggaaaaacggtatttacggacgatgctgaaggagcgccaaaagtaacgttagatggatttgaaaagacaaacggcatcagctataaagataactattattaccttgagtggagaaactatgcaggcagcgataaagcacttcaattcgcgcgcggtgcaaaatataatacaggcatgctgctttggtacgcagatgaaagctaccttgataactgggtaggacaacatccgggtgaaggattccttggtgtagttgattcacatgctcataaagttctttactttaatgtgaatgggattagcacgacagcaaattcaagccgatatcaaattgcagacgcggccttctcatttgataaatcacctgcttggtcatattctcataaaacgtggggaactatttcatctaaagaatcaaatggagttacaagcttcaacgacaaaaaatcgtatttagatgaaagaattaaagatgcaggccgcttgcttcctcaaaacggattgaaattagacgtaattggcgaagcaaaagacaattcagctggtgctgtatggattcataagtgaaattagacgtattcgaaaaaagatctgaagagcgtattcttcggatctttttttgtattataaaatcaaaataaactatgagctaaataatcaaagtattcaagaccgtttaaaaaataaaataaagggaattttcaacagtgaataattgttattatgtcatgaaattcatccatataatcaatactaataggtaaagaaaataatgaaaaggagttctaactatgagctatcgtatcgaaagagattcaattggagaaatcaaagtggcagaagataaactatggggagcgcaaacgcaaagaagtaaagaaaattttccaatagggattgaaaaaatgccgattgaagtaatacgcgcttttgcggttttgaagaaaagtgcggctattagtaatcataaactaggcaaactatcagctgagaaatcggaagccatcgtgcaagctgctaacgaaattattgaaggaaaatggaatgaacattttcctttagtagtatggcagacaggaagcggaacacaatcaaacatgaatgtaaatgaagtgatttcccaccgaggaaaccagctaataaatagcgacgaaacgcttcatccaaacgatgatgtgaatatgtcacaaagctctaacgatacttttcctacagctcttcatattgcagctgtactagaagtggaagatcaattattgcctgctctaaaaacattaaaagaaacgttcgctgcgaagcaagagcagtttaaagatattattaaaataggcagaactcatttacaagatgctacaccgctaacactaggacaagaaattagcggatggcatcatatgctcgaaaagaatgaagaaatgattaaacaaagcgtagagtatatgaaggagctagctattggcggtacagctgttgggacggggataaatgcacatcctgacttcggcgatgaagtagcgaaagaaatcagcagcacgcttggaaaaacatttatctcagcacctaataaatttcatgcattaacaagtcacgatcaagtggtttatgcccacggtgcactcaaagcattagcagctgacttaatgaaaatcgctaatgacgtacgctggctggcaagcggtcctcgaagcggattaggcgaaattacgattcctgctaacgaaccaggaagttctattatgcctggaaaagtaaatccaactcaaagtgaagctctaacaatggtttctgcacaagtacttgggaatgacgtgacgattggcatcgcggctagccaaggaaactttgaattaaatgtatttaagccggttattatttataattttttacaatcagtcagattgctgacagattccatgcaagcttttaacgataaatgcgcagtaggaattgaacccaacaaagaaaagattcagcataatctagaaaattctcttatgcttgtaacagcattaaatccgcacataggttatgaaaatgcggctaaaatcgccaagctggctcatcaagaaggaacgacattaaaagaagcggcggtcaaaacaggccttctgacagaagaacaatttaagcaatgggtaaatcccgctaatatgattcatccatcaaaataaaaaaaagaagctaagcattctgagctgcttggcttctttttaataaatcttaacaaaataaacattgttctaaataaacatttaaaaagaatttgcggattaaaagaaattttacactgccttatatnnnnnnnnnnnnnnnnnnnnnnnnnnnnnnnnnnnnnnnnnnnnnnnnnnnnnnnnnnnnnnnnnnnnnnnnnnnnnnnnnnnnnnnnnnnnnnnnnnnngccttatattagattcaagtacatacgattagggtatttacatttttataaaggagggattcaagtgacgtacgaagtgaagttttattttggaaatgaaaaatcaatcagtacattggttgaatcagaaaatgtaaaagagcttgaggaatctattattcatacgcaaggatggtatcgttattatgacaaaaaacatgaagcttatttagctattcaaatgagcaatgttttacacatcgttataaaagaatatcaggatccggaaaaaacaggggttttgaaagattcgtcgtatacataaggaagctagcaaaagaggtgaaaactatgcaaaggcgacatgcaaataatcctattattctcgacgtttctcatcatcaaggaatcattaattggaaagaaataaaaaacacctcagtaaaaggggtgtatataaagttaacagaaggcggaacttttgtagaccctagatcctttgaaaattatataggtgccaaaaatgcgggcttgagagtagggttttatcattatgctcactgtacaaatagcccggagaaagaagctgctttttttattgctcagcttggacaaatgaaactagaccttccgccgtgtttggatctagaagaagataagaaaaaatctaaagaatttgtttctcactttgccgtaagctggctcaagcatgttcacaaaacaacaggaattaagcctatcgtatatacgaattatcattttgctaaaacttttttcacaaaagaaataagtaagtatcctttgtgggtagcaagatatagtgcggccaacagacaagacggtatgcagcaccctggtgagctaagtcagtggcagcgatgggcaatgtttcagtatacagattctggcagagtaaaaggaatttctacaaatgtggatataaatgaaatggactgctcattttttaaagaagtcacaacaaatctctctatgacgaataatacaaaagggccctttgtgtattccaaaggtgatagagggttaggagtcaaacaaattcagcaaaacttacttgcgctaggtttttctcttccgaagtttggagcagacggtttctatggagatgaattaatcgctgcaatgaaaaaattccagaatcggtatggccttttttcagatggaatagcaggagcggacacactgccgattcttgttaaagaagtgaataatctgaataatctggtttgagagattacctgagggggaaaagttactgtaagattcaaaaaggtacaaggaaggagctattatgagaaaaagaaaacaaaaagcattgatatcaggtattacgctatcaacggtaggagtcggcattacgtcttatatattaagcgatgctgcgaaacgacggaaagtaaaaggacttgttcgaagtgccaaagtaaaactttcaagtttatctaaaaaacagcaggtaaatgctagcctaaataaagatgtgcattcagatcctacgtacgtttctgaaagcaatatgatttcagaaggacctatgtatcaagatcagcatagataataaaaaaactagtcttgcctcgggcgagactagtttttttattaattttataaatagcagcgtttattcatggtacactctctatataagggaattattttacgcatatttacaagtaaaggaggaatagaaggagtgattagtagcggattatttgttaacttatgtattttttcgttttttgtcagtattatgattgcgataagaatatttttgttacagcgtctagcccataaatacaaatggatgagtggtatttatgcaagtattgtttctgctattcttatggtatatagcgttacgtatcaacagattacatatgatttacgttttcttcctcttattttgaccgttctatactttggttatagagccggtgcagttgcaggtatcactatggccgtgtgcagtatctatttagaaagtcattggttactgactatcttaattttaattttcacctttttgttttcccttcctcttattcgatatagaaagcagttttctttattaaaacaatctcttctttgtttctttattcattttatcgttcatgtcttactgacaaattacttctggaatacacctattcagtcgccgttttatagcgaaatagaatatttagtgttcggaattctcggactgggagtagccgtagcgacgatagaattttatcgtaaattttacgctgtagcagaagaagctgcttatgctggatcagattcatgtaaggatgaagaagattctttttttgtcagaataatgaaaaaagaattagaatatacgaaagaacagctggagtcttttattaatcatcacatggatgcggttattataactgatttagaagggcgaatcttgcgagttaatgaagcttatgaaaaagtgtatggctggaaatcccatgaagtcattggggaaaaatattacgatatagcaggagcttttagtgaggatgtacatgagaatataaaaaagactgttgctgaaaaagaggcaatcaatcgagtagaagttgtaagagctcgtaaagatggaagtttagtagaccttcgtatcaccatttctccaatttttaatgggaaagatgagttggtaggtttgtctggagtatgtgtggatatatctgaagctaaaaaagcaaaggaagagcttgacttgctgcatcgtaggcttaaagaaagtgagttgaaatatcgcacgttatttgagtacgcaaacgacgcaatttatttacttgaaataggatcggatcattttccttctcgctttgttgaagtaaatgaagctggatgtaagcgctttggatatacgagagaagagcttttatccatgccttgccacgatattatacctagagattctgacattgttcaaaaaacagtcgaagaaattcgcaacggaaatctttcttttacgctgcaatcacagtttacgtttaagtccggcgaaataaaaaaactagaatatagtggaaagttgttcaatatagaaaacaaaaaagtgcttcttattgtttcaagagacagaacagagtacttaaaaacagaagagctgctgcagaaatctgagaaattagcagcggtcgggcagcttgctacagctattgctcatgaaattagaaatcctttaacagccattaaagggtttatgcagttattaactgaaaaagcgagtaaagaagagttaacctatatgaacattatatcctctgaaattgagcgtattgaaatgattacaaatgaattcatgtctgtggcaaaaccacaggccgtaacatttcagtcgattgatttgcagctgttaattcaacaagtgattttattgtggcagcctcaagcaaccatgaaaaacatctttattgaacttaactcatatggagaaatgccttttgtatattgtgaaagcaatcaaatgaaacagatgtttataaacattcttaagaatgcgattgaagcaatgccttccggaggagaaattaaagttgagctgagaaaaaaggacaacaatcatattcatattcaaattattgatgaaggtgtaggaatttcaaaagaacgcatcaaacatttaggtgaaccattttacagtattaaagaagacggaatcgggttaggattaatgatctgctttaatattatccaacagcatcaaggaactcttagtattgacagtgaagtaaacaaagggacgagtgtagaaatttgtttaccgttagaataaaaggtaatcagtcaaagggagaagaaattttgcaacaagttgtttagtaaagttataatattctatgttggagtaaaataagcaaaggagtggttacgattaaacagaaaaagtggattaacatatttcgtattctgtatattatttttgctattattgcgattggagcatcttttggagactattcttttgggcttgataatccccgcatagtcagtttaacggctcttgttttggcggttatctgtattgttccgtattacatacttcgctttaaagaacaagcttctaaaagtaaataagttaatatttgttatcttaaaagaggctgggacaaaagtattttagttgaaggaagatccgaacgatgaatcgttcggatttttttattgttatggtgaacatgggtttaatctagctggttgcttctagcggttgattggagtgatttcgttatgtctcagtctcttttttatcgtcataaaagggcgataaatgggcgagcattttttctagcctgtacatatgctataaagtaaacaggctacggaggtgaagtgaaatgggattttacaactggggttacggcggtggttatggctacggcggctacggtagttacggtggcggttttgcattaatcgttgtactatttgttttattagttatcgttggttgtacatgcttgaaataaacagaaaaagcacggatttacaaagattttagtagattcgtgcttttttatgttcataagaagggcagtactataataaaataatgttatgcatgtacataaaaaacatacaaaaaatttaattaatagattaaaaaaataaaaaaatgaagagaaagagtagattcaagcctcaaaaacggtctgaaatttataattttccttataagtaatttttgtaaaatgcttttcaggactgatagtaagaccgaataatacttcataggtcgctagtttttatcagctgacttgaagaattattttacttgtatgaaaatcaacataaatgaataatatatagacgtagtaatttttagttgctataatgttgctaattatctcaattaacagaaaaattgcggtaattaaatttactagggatagggagaaaaaactatgaaaaagaaaaaacaggctttaaaggtattattatcagttggtatcctttcttcatcatttgcttttgcacatacgagcagtgcggcgccaaataatgtactttcaaccgaaaagtataacaaagaaattaaatctcctgagtttatttctggaaagctttcaggcccatcatcacagaaagctcaagacgtcgtatttcattatatgaatacaaataaagacaaatataaattaggaaacgaaagtgctcaaaattcatttaaagtgacagaagtagtgaaagatcccgttgaacaagcaaccgttgtacgcttgcagcaggtatataataatattcctgtttggggatctactcaattagcacacgtagcgaaagatggaaccttaaaagttgtatcaggtacagtagctcctgatttagataaaaaggaaaagctaaaaggacagaagcaagttgacagcaaaaaggcgattcaagcagctgaaaaagacttaggctttaaaccgacttatgaaaaatccccttcatctgaactgtatgtttatcaaaatgcttcagacacaacgtatgcttatgtagtaaatttaaatttcttaagccctgaaccaggtaattattattactttgttgatgctattagcggtaaagtgctagataagtacaatacgattgattccgtagctggtccaaaagccgatgtgaagcaagcggcaaagccggcagcgaaacctgtaacaggaacaaatactattggctcaggtaaaggagtgcttggagatactaaatctttaaagacaacgttatctagttccacttactacttacaagataatacaagaggagcgacaatctatacgtatgatgcaaaaaatcgtacatctctgccaggtacactatgggcagacacggataatacgtacaatgcaacccgcgatgcagctgcagtagatgctcactattatgcaggcgtgacatatgattattacaaaaacaaatttaaccgcaactcctatgacaatgcaggagctccgctaaaatcgactgttcattatagcagcggttacaataatgcgttttggaatggctctcaaatggtatacggagatggagatggaactacttttgttccgctatcaggaggattagatgttatcggacatgaattgacgcatgcggtcacagaaagaagttctaatttaatctatcaatatgaatcaggtgcattaaacgaggcaatttccgatattttcggaacattggtagaatactatgacaaccgtaatccagattgggaaattggagaagatatttatacgcctggtacaagcggtgatgcgcttcgttcaatgagcaacccagcgaaatatggagatccagatcattattcaaagcgctatacaggttctagtgacaacggcggagttcatacaaacagcggtattatcaacaaagctgcctacttgctagctaacggaggaacgcattacggggttactgtaacaggcatcggcggcgataagctagggaaaatttattaccgtgctaatacgctatacttcactcagtctacaacgtttagccaagcgcgtgcaggtttagtacaagctgctgctgatctatacggttcaggctctcaagaagtaatctcagtaggtaagtcatttgacgcagttggtgttcaataagttataaaccaaaagtcgcaagataaatgaggtatcttacgactctctatactaccttactaccaataaaggagtactcgtataaatatattacagtactcctttattttatgttaataaataaggagaacggatttctgcttgatttataaaaatccacttcttattcctcccttttatgtccattcgaattataccgttgtttgttaaatggagagaacacgttttagtaaacggtcttattataaaatgttataataaagaaaagaattgaatacatacatatgaaaaaggagtggaggaatcaatggacaaaattgctgttatttcagatatccacggaaatcttcctgcattagaagcagttttagctgacatacaacagcgagatatccatcgcatcatttgtctaggtgatttagtaggaaaaggaccggattcaagtaaagtgattgatatcataaaagaaaagtgcgaagtaacagtaatgggaaactgggatgacttcattacaaagcctgcggaattcgaagcgttgaaatggcatcagaagaagttaagttcagcccaagaggcatacttaaaggaacttcctttttccgttgagtttatgatgagcggaaaattaattagaatgtttcacgcttcacctagaagtctctatgaccgaattcaaccttgggattcacttgaaaagcgccttagtctatttgctaatacggaatatacagaaaatataaaaggatcaagagagccagatgttatctgttacggagatgtacataatgcatttattcaacatattaaagggaaaacgctatgcaatgtaggaagtgtaggaaacccgcttgatttaccacaagcttcctatcttatcttaggaggaaaggatcaagacgaaagtccttcatcattttctattcaatttgtacgtattccatacgatattgaaaaggctatcgaattggcgagagctgtagagatgccagattttgaaccctacgttcaagaattaaaaacagctcgctatagaggactaaaaaattaagaatagaatgtatctcaaccttcagcataaatgctgaaggttttttagtggagtatatgaggggtttttcaacaccattagtatgatacatgcaaataaaaattattccgatgaatttaaggaagggaaaacttggagaaaaacatacagcatttgaaaggaaataaattttattttatgaagacaatatgaagagggcaattccatttgaacataaagtcataaaaacgcccctgaaaagctgtttttaccataacgagtggaggaatacatgatgaaattttttattgatacagctaacctggaagatattaaaaaagcatataaaattggggtattatcaggtgttaccacaaacccttcgctagtagctaaagaaggcgtaaagtttgaagatcgcatcgaagaaattttaaaaaccgttcctgaagtagaatccgtttcagcagaagtcacacccgacacagtaaccgccgatgacatgattgctcaagcagaagagctgataaaaattaatggaggagacaaaaatataacgattaaacttcctatgaccattgctggattggaagcaacccgttatctagctaaaaaaggcgtaaaaacaaacgtaacgttaatttttacagtgaatcaagcgcttctagcagctcgtgcaggtgccacatacgtatcgccatttttaggacgcttagacgatatttcagaagacggtgtttatctggtatctcgaattgcagagctatttcgaattcaacacattgactcacaaattatagcagcgtcagtcagacacccagatcacgtcacacgagtagctcttgctggggctcatattgctacaattccgtatgccgtaattgaacaattagtaaaacacccgttaacagagcaaggaattgaaaaatttgcatcagactgggaaaaagctgtaaaaagttaaattcacttaaggagaagacatcattttagtgtcttctctgcttaaagggtatacgaagattctttttttctattttgtaacaaacaacttatcaataataggcgaacatcctatacatatatgcagagatgacatacgttaatagaaacgaaagaggtgttaaaatgggctgtattattaacattgaaaatatcgtgactaacgggttaaaagacaactcgaacgtaagcgtaggctgtgttgtacaaaatagtcacacggcaaatacaaaatcggtaggagcttgtttttcgtttggaaacggctctcctgctattgcctctatgacaaacagtaatatcgacttttgcaaaggtgaagaaaataaagagcagcaatcttgaaaacaattccagaaagagtatttctggaattgttttttggtaagtgatagagttttgttaacaaggtgttttggcttttaaaagaaaatcattcatgaggaaggggttgagcggtgctatgagcattatttctatgattccttatacatacgttgaaagaaaaataaaacgaacacaaaaagtgacaattcagcattcaaaagacatgtgcttatacgctgatagtattgaaacacaaaacgattgctttcacattaatgacgtatttgacatctcttacaaatgcgtttcaaaagacagcggctttttatacttacatacaaatcaagggatgttcgcttataccatacaaaccgatccttctgcctttataacagcatataaaaatataaaaacgaaggggtgacattgcgtcaccccttcgtttttcgtttcttattttacccactgtacaacttgatccatacttcttctcgtttttccgcgtttaggttcatgaattcgatagccgaacgcaaccataacggaaatatcaaacttaccgtcttctagtaatccttcttcttttagaatctcatgtacttggtcatagttaaatccttcaatcggacaagaatcaataccaatttgagcagctgatgtcatcatattagctagtgcaatataagattgtttgctagcccaatcaaatagggctcgcttgctttcgaacaaatgaaaatcattttcttggaaatctttataacgaggcattaatgtctctaatacatcatccggcatttcttttacatttttttgaagattcaacacatattcagagtcatatcttgcgtctgtacgagaaagaataataacaaaatgacttgctgtaggaatttgaccttgtgctccccaagaaacagcttttaatttttcttttaaatctttattttcaacgactaaaaacttccacggctcataacctactgagcttggagataagcgccctgtttctaaaatgaattggaaatcttcatcggaaattttcttcgctggatcaaactcttttgtagcatgacgaaagttaaatgcgtctaaaatttcttgttttttatctgtatggttcatgtgtaaacaacctttctgtaaaaatatttagtgatgaactgttcagagtaatctataccctgtatagcttacaattaacagccagttaacatacaatttgtcataaaatccgtttgcagatttatcataattcatataaaacattctaacaagtacgcacatttttgttatatagtatacttttttatactattgatgcagtttcataagaagcagaaaggagtcaacaatctgaggagtttcgttttcgaaaaagtaattaagaggaagagaggagaagagtgatcttctccttgttaattaaatttttgtatttgactttttcgctttgttttcaagttcacttttcggttctgttgaaaattcaacatcttttccgtgtccttgagggttaactccaggagctacttgaccgcggttagcagatttttttgtacccattttcgtcacctccgttcggttagtatgtacaaaaagcaaaacaaaaattaggaagtaaagcgtagaaagataaataggaaaagattatctttaagcatcttcattacataaacaagatagttactcatttaaacggacataaaaaaacacccttggaagggtgttttttgtttaagaatctcagcttgtcgctctgtctgcgtatggatagataggatcttttaattgaaattcgtaagtcactccatctacaagtcctaccgttttattgctatcataaaggtccagcataaaagcagccatttcttttgacgtatgaaacttaggtactcgtccttcgtattcaaaatcactcatatccatcgaacgctgtgcaaattctgtttcagtagccgccggagctagaactttagcctgcatttttgctcctcttccttttaattcttgagaaagaccttctgtaaatgcacttacgtagaattttgttgcgcaataagtgactgcatcagcaacaatggtgtagccgcctccagaagaaacattaataagctgtgtaccttcaacgttttcataatctcttacaaataaagatgaaagaatggttaaggcttctatatttaaatgaagcattgtttcaattttagttaatttttgttcaccgacagaagcaaagtttccgaatccagcattgttaatccaagtttctaattcatactctttgagtgactcataaaacgtatgagcattttctgccacggataaatcaaccgactggacaataacctttacatcttgattcagttcttcaacttttctttttaactcttctagcttgtcctctctacgtgcagccaatataagattttttccacgtccagcaaaagctaaagctgtttcatatccaattcctgaacttgcgccagtgattactgtatatttcatgttgattcctccattttcgatgttttcgaattgattataattgttaaagtatactttaagtcaagcgtttattcggtttattttcccgtttagaagtctgtttataaacatttgaagttgggtgctaaacttttttgcttttatgctacacttgaaacaacagccgaaatttcatttcattaaaaggaggaatgtatgcgttttcttaatgtgagtagaagacctagcttacttgcccaaattacattacttattacggtagttattcttgtgagtactgtccttgtatgcgttttattttctgcaatgatagatgaaattgttgaaaaatatgtaggtaagcaagctatgacagtagcaaaattagcttctgaagacaaagcgattgtaaaagcttttaggaataaaaatccttctgagcacatccaacctattgcagaaaaaataagaaaaaccactggagcagattacgtcaccatcgctaatgataaaggaatccgctattctcatcccaatagtagctatattggaaaacataccaaaacaagcaacgaagcttctttaaaggagcatcaatccattatttataaaggaaaaggaatttcaggatttgcaattaaagccaagactcccatatgggatagccgaggaaacgtaataggcgtttcgtcagtagggtttcttgtaagcaatatagaaaaacagattaatgattatagaataaaaattattaaattgtcctgtattccttttcttattggagcatttggagcttttttcattgcaaggcgggtaaaaagactaatatttggactggaaccggaggagatttcctttctttttaaagaaaaagaggctacccttgaatctattcaagatgctactattactgtaaatgtcgaaaaatatgtaacgtcgatgaacagaagggccagagaactatttggtcatcttcaaataggaggagagataaagaacgcccgtttaggacagctaattgatcaagtgatagaaaagcaacgagtgtattctaaccagtcccttgtactagatagtcagcagtatattttagatttatctcctattataagaaaaaaagaagtgcagggtatcgtccttactataagaactttatctcaaattgaagagttgacagaagagatttctaaaattaaaatgttttctgataatttacgtgctcaaaatcacgaatttttaaataagctgaacgtcatttatggattgttaaagttaaagaagtatgagcatgtcatacaaatgatttcatcagaggtaaaggaacgccaagatattatttcttttttaatgtcttctgtaaaggatcctttgattgcggcatgcttacttggaaagatcaatcgttcgaaagaattagacgttactttagaaattgaccaagatagtaacttaacaagtactttaaatatcgaagacgcaaaaaacgttgtttctatcttggggaatttaattgataatgcgctcgaggctgtgcgagaacataaagggaacgtgctggtatcttttacagatgtaggaaatgacctgatttttgaagttgaagataatggaccagggatatcaaaagaagtagaaaatatgatttttatggatggttacacaacgaaaaaaggtgaaaatcacgggattggattgactattgttaagagatctgtagagctgcttaaaggtgaactatacataagcaaaagtatgttacaaggagcaagatttacattagttatcccaaagctattaaataatgaaaaggaagaatcgatatgactgaaaatcaaattaatgtcatgattatagaagatgattctacagctgcacaaatttatgaacagtttactaagaaactagagcatttcactgttgttgcgacagcaggatctggagaacaggctttagaactgctaacaatatttacgccgcaattaattttattagacgtctttttaccagatatcaacggagtggagctgctatgggaaatcagaaaaaagtatcgaggaatcgatattattttaataacggcagccaatgatgttgaaacagtaggggaagcaataagaggaggagcatttggttatttggtgaaacctgtaattattgataaatttttatctactttaaaacattatcagtctacaagaatagaattaaccgaaaataaaatgattaaccaagataaaatagaccatttatttagaacacgtcataaccgccgcactcaatcagcagctgcagtaacagaacttcctaaggggattgataaacatactcttcgtttagtaagagataaagttcgcgaagttcagcagagcttgaatgtagatgagttttctcaactagtaggtatcagttattcaacaatgagaaggtatttagagtatttagtatcgtgtaaggaaatgcaggtggaaatagtgtacggaagtgtaggaaggcctgagcggaaatatcgagtaactaattttacataaaaacgagatagcggttttttatccgctatctcgtttttatgtagaaatgatgcatgaaaaaaatgaaaaaaattacttttataaaagatattaaacttatgttggttatctatgaacctgctttaagaagtgatacctttttagtaacgtatagcaaacaaaaaatgaaaacgttaccaaaaaaggaggaaaaatatccatgctttctttattaggatttttaatggttgcagtattcatgtatttaattatgtcaaaacgacttaccccaatggttgctcttatcactattccaattatatttggtttaataggcggttttgctagcggaatgggacctatgatgctagagggtgtaaaagatattgctcctacagctattatgattttatttgccattttatattttggattaatgattgattcaggattgtttgaccctctcgtttccttcattttaaaggttgtaaaaggagatcctctaaaaatcgtcgtcggaactgctgttctttcaatgatggttgctttagatggcgatggaactactacctatatgataacggtctcttctttgcttccattatataaacggctagaaatgaatccgcttatcctagcgggaattgcgatgctatctatgggagttatgaacatgactccgtggggaggtgcttctgctatggctatgagttcattaaatttagattcgtctcagttgtttttacctttaatacctgtaatgggttttgggcttctatgggtgctatttgtttctgttgtccttggaagaagggaaagaaaaaggttaggagttatcaatattaaacattctgcaaatgaaatggcacatgcagatgaattagagggaacagcgcaacatttagactatcgacgacctaggttagtatggtttaattttctccttaccgttagtcttatggtgtgcttaattatggactttatgtcgctgatgcttttgttcatggtagcgtttgctattgcattactaataaattatccaaacatcaaagatcaacagcagcgaatttcatctcatgcaaataatgcggtagccgtcgtttcaattgttattgcagcaggtatttttacaggaatcatgtctggaacaaagatgattgatgctatggcaaatacgcttgtagggataatcccagatgcaatgggcccttttttgccagttgtagtagcatttttaagtgctccttttacattttttatgtctaataatgctttttattttggtgtactgccgattattgctcaagctgccgaaagttatgggattagcgcagctgaaattggaagagctgctattttaggacaacctgttcacgtgataagtcccttggtagcagcagctcacttattaattggaatggtaggaattgaatttagtgatttgcaacgatttttaattaagtgggcgctaggaactacggcggtaatgacactagctgcattaattttaggtgttatttccatttaataaaaaaagacccctcggggtctttttttatactcttaagttgaactagactgttcgctgcagctgctttttttaaaataaaacttataaattaaaaatccgcatacagccactaccgctgcaattagaatataagtttgtgcatctgagataaaagattgaatggacttaaagtttccgatttgtcctagccaaagcatggcaatattcaaaggaaagataccaagaaatgtgagcagagcaaacggcataggtttcactttagatagccctgaaagataggaaatgtagtttccgagccctaaaggacgagcaatcgcaatactccataatccgcattttttaaaccatttttgtgatttctcaaatgcttttttctttttagataattttttctttaccttatcctctaatttatagcctatcccatacggtataaagctaaaagctgtataaacggcgcttcctgcaagagcgattaataataatttcactatgtgcatgtttaataagtatccgtaggtaagggtgagaagagaaccaggaaacggcagggaggaagcctcaatggccagtccgcttaaaagtccccaaattccaaattgtttcagtaagtctgttatgaaatgtagcataagatcgcctctttttctgtgtcataacattcaaatacccatctatatgttcggaaaaacttataaaagaaaagaaaataaaggaagaaagcgggatatgacagaaaaaaattagcttgtacaaggaaaaaggaaggaagtgtattttatagcttctactccgagtaaaattataggaaaaaaataattgagggtgaatttttaaataaactacgacttttattcatagttttgattccttttattcattttacttataaaaataacgggtgtaaacttgttgtgttgtgaaataatccattatgtatatgtattaaaaggaaaggaggttaccgtgtggttattattgtaggattgttattgttgatgttttttgcttatctaggatggtctattatctgggtggcacctgttgttgctacgttcgttgcttattttagcggtttaaaagtactgcctacttatacagatgtgtatatgggagggtttgtagatttcgccgcaaaatggttccccatctttttattaggagccgtctttggaaagctaatggaagatacaggcgcagccaaatcgttggcgcagcgtattgctaaattatttggaagtaaaagagcgattttaggggtgctaattgcttcagccattttgacatacggcggagtgagtctattcgttgttgtctttgcgatttatcctttagcaatcgcgctatttcgagaagctaacgtatcgcgaaatttactgccagcaacagttgcactcggagcatttacgtttacaatgacagcgattccaggtacgcctcaaattcaaaatctgattccgactgctacatttaaaacgaatgcaatgtccggttcgattattggaattgtctcaggtcttattatggcggtgggaggatatttatggttagcttatcgtgataaaaaattaaaagctaaaaatcaagggtttaccgagcctaatgaatcatcagtcgcagcgagtgaagagcaggacttgatgaatgtaatattagctattttaccgctgattgtcgttgtcgtgacgttaaacgttttaaaatgggagcctatcgtttcattattaattggtattttttctattttacttattaattttaaacactataaaacgtttatttcttctataaatgaaggagcaaaaggatccgtgatggctgttattaacacgagtgcagcagtaggttttggctcggttattacagcagttccagagtttaaagatgtcacgcatgtgttgctaaacatttcgagcaacccgctcgtttcagaagcgttaagcgttcaagtgctagcgatgatcacaggttcagcatccggcggtatgggcattgcgcttcaagcattaggagatacgtggtatcacttgtctcaaacgacgaatttaagtgccgatgctcttcaccgtattgcaagcgttgcgtcaggtgcatctattttaccgcataacggtgcgttgttaacgctattagcggtaactggtcttcggcataaagaaacgtataaagacgtatttgttgttgcatttatcatccccacaatcgctttatttgcaggagtcgcattagcggcagccggtattatttaaaaacaggaggagaatacacatggttgaaaatcaagtaattgtaatcacaggagcagcaagaggaattgggtttgaaataggtaaacgattcgcagaaaacggcggaaaaattgtgttatccgacattgatcaagctgctgtagaagctgcagcacaaaatcttcgtgaagctggatttgaagcgcttggtgtcaaagccgatgtaacaaaagaagaagaaatcaaacatttaattgaaacagcaaacgcacattttggagcggttcatacgttcattaataacgctggcttgcagcatgtttctccaatcgaagagtttcccactgaaaaatatgagttaatgattaaaattatgctaacagctccatttatggcgattaagcacgcgtttccgattatgaaaaaacaagggttcggacgtattattaacgtttcttctatcaacggtttaatcggttttgcgggcaaagcagcttataacagtgctaaacacggtgtaattgggctaacaaaagtagctgctcttgaaggcgcagcacacggtattacggtgaatgcactttgtcctggctatgtggatacaccactagtgagaggtcagttagctggtttagctaaaacaagaaatgtaccattagagagcgtgcttgaagaagttatttatcctttagtccctcaaaaaagattactagacgtgagcgaaattgctgactacgctattttcttagcgagtgataaagcaaaaggtgtaactggtcaagcggtagtaatggacggcggatatacagctcaataaaaaatagaataagtcattaaaagcataaaggagtctaatgagctcctttatgcttttttatgttatatctattctatcgagctaatcaacgttaaaatataactaggctatacataaaagaagccttatactatttctcctgtaaagataaatagtatgataaaaaagcctacagttcagaaaggatgatacatatggtgcaaacagtaaatgaattaattaaacatccggttttttatttttttaacgaaatttcagctattcctagagaatctggaaatgaaaagaaaattagtgactatttagtttcttttggaaaagaaagaagccttgaagttatacaagacgaggctttaaatgtaattattaaaaagccggcagctaaaggatatgaagatgctccagccatcattttgcaaggacatatggacatggtatgcgagttaaataaaggaactgtgcatgatttcgaaaaagatccgcttcaactgcgaattgtggaagatatgctttatgcaaatggtactacgctaggagctgacaacgggattgccgttgcatatgcactggctttactagatgctcatgatatagctcacccctctcttgaagtagtcattactactgaggaagaaacaactatgggcggagccatcgctgtaaatccagctcattttgaaggaaaaatctttattaaccttgatacagaagaggacggaaagctgcttgtcagcagcgcaggcggggtaaaaagcgtgcttcgtattcccgtagactgggaatcgtcttccgataactcagaaacatatagcttaagcatcggtggactgcgcggcggacattctggaatggaaattgataaagaaagaggaaatgctaataaactgctagggagagttttatatgacttacaacatgaacttccctattctttaagcagcattagtggaggattaaaatcaaatgcgattccccgtgaatcagaagcaattctatcagttgagccttctgaggtaggaaagctagaaaataagattcgtgagtggaacgaaatagtaaaaaatgaattacaagcggctgatccgagcgtatatgtaaaaataaacaaatcttcttcctttgagaaatgttttacaaaagaaacgacagaacgaattgtacaagctattatgctaacaccaaacggcgttcaaagcatgagtatgaatatcgaaggattagtagaatcttctaccaacttaggcgtgattacgacgacagagtctgagattgtttttcaaaatgaaatccgcagctcagtaaaaagcttaaaagaaaaaatagtaagtcaagtgcacatacttgctcaagtagtcggaggaagagttgaaacaaaaggcaattaccctgaatgggcgtacaatgcagattcaaaaattcgcgaattatgtaaaacggtttacaaagaaaagtatggggaagaggcggagatcatcgccatccatgctggaattgaatgcggtattttcctggaaaaaatctctggattagacaccatttcgctcggtcccgatatgtacgacgttcatacgcctgatgagcacctgagcattccgtctactattaagacatgggaatacttattagcggtattaaaagaagcaaataagatataaagttatcagcatctctataatttttaaaaaagagcttctgtaaaggagctctttttcattcgtcatttagcagataataagcagaattccgtcaacacgtcaggcaattgagaacacttatgtaagcgttttacaaataaaggttttaaaacgggcctaaaagaggtaaacaattactaaaacgatagacaaatgaattcaaaacaagctctgcaactaataaattagtagggagagaacatatatgaatgataatagtcttatcaaagatccctttttggaaaaaggagaaattgaatttttagaattaaggaaagacgaaatacgttatctaaagttcgatcggtttttgaaagtgattaaagcacttaatcaacgcagtgataaaggctaccagagtcttatgctttccgttgatggctttaaaggtaattcaagagaattatatgagataatattattttatattcacgataaaaacaaaatgactaatcaaattttgaaaagtttatcaaacaacagcagccaaccggcctctatagatcctaagagagcacgtttaatgattgatgccatacaggagcaagtagagaaaacagaggataaagagataaaggagaatctttctgaattcgtatgtaaaatccagagctttgtgaatcagtattaacagttcccaatagaaaagcagaatccatattataaaaaagtacgagaactcaaaatttctcgtgcttttttattggaaaaacagtagaaagagaaaaggattatcaacatagattgataaataataaataataatggtaaagcttcatattctgccgtgaaataacaaggaggaatgaacattgcattatattgaaataagaagaccaaaaatagaagaccgcgcagaactccacgagctttttaatgaagtaatcacagatacctttcataaagagggtctatctgaaatggtgaacgatatacaaatagaaattgaaagtaaagaacaatatttaaaaagtgaccttgatagcggtggaaaacatcgattcttttggctcggaatagatacgtgcaccaataagattattggctgtattgaatatggtcctgctagtgaattaattacggcgtgtacaaaaggagagctgcaaggatggattgaaatcggcacagtttttgttcatccaaagtaccaaagaaaaggtgtaggaacactgcttttacatactatgctgcttacgcttcaaagcagagaaattaaaaaaatttgtttggacagcggatacaaaaatgctcaagaagtatggaaaaacatatttggaatccctgattatttagtaaaggattactggagcaaggggtatcatcacatggtttggaaaatatcagcggaaagtacgccgatagtatttaagctcagttataacgaagaataagatgtctcctagaaaatagccggtacgtttctaacggctattttctactgttaagctgtttacatatgttcaattatatatcagtgtattttattaaatataataccttgactgtcatagtaatatgatttaaattatacataaagaggtgatactttggtatatgcaaaaatgtcttcagatttacttcggggacatacagatacaatgattttgaaattacttctcagcggcgataaatatggttatgaaattagtaagcttatttacacctactctaaagagcagtatgagttaaaagaagccacaatgtattcaagcttgaagcgcctggaaaaagacggccatattctttcttactggggagatgctgtacaaggcggccgcagaaaatattataaaattacagaacaaggaaaaagcgtatataaacaaaacaaagaaaattgggagcaagcgaaaaaaattattgatttattgttgtgagaaaggatgatgttataaatgaacgaaaaaataaaaaatcatgtgcataacattttgactccttatcaggatgtagaaaatgttcaagatctagaagaagaactatcacagaacttgcaggaaaaatttacagattacaaaaaagacgggcataatgaagaacaggcttattatatgacaatcaattctatcggtgatatcacagaactgattcaatcaatgaatgtagaaacaaaggaattaaagcaaaccgtccctatggatttttcaaagaccgagcttacaaaatctgattttcgttctgtatcggtgtataaagggaaatttaatgccagtaatttgaatgaatctgattttagctatgcagatcttacagacagcatgtttaaaagcagcaatttaacgaaagcaatatttcatcacgttaatttaacaggcgtacaatttaaatgggcaaattttaaacaggccagttttaaaggctgtatctatgacaacacgtactttaagcaatgtaatttaacagacattgtatttgacgaagaaacatttaacggaacaatctttgaaggaacatcattaaaaaaagcctcatttcgccacgcaactttgctaaatgtacagtttcgaggatcagatttaaagaaatccgattttgaaggtgcaaaaatggataaattgacatataactttttaaaaagtgccaagatagatcttagtaaagttacgattatttaaaggcaaaaaagacctctctgaaggtctttttttatggacatataacgattctttttaagagcgagcaggatagtttattagagagctagaacacattcataatacgaacaattacggcaacaagctgaatatgagaagaacataatcttatctttgaaataataaagcttttattacttatgtggaggagtatggaaatgtctatatatgaaatttggaatgaagtggatctttatatgaatgataagcttatacaacctgaccctattcttgatgaggtattgaaggcaaatcaagaggctgaattacctgccatcgacgtatcgcctagtcaaggaaagtttctgcatttgttagcttcattaaaaggagctaaacgcattttagaaattggtactcttggagggtacagcacgatttggctagctagagctcttcccaaagacggacagctaattacgctcgaattaagcgctcagcatgcagaagttgcaagagctaatttaaaaagagcgggagtaagccacttagtagaagtcattgtcggccccgggcttgatacattagctgtattaaaggataagggaacagatccgtttgatcttatctttattgatgctgacaagccgaataacccaaattacttaaagtgggctctagaattatcgaaaagaggaagtctgattatttgtgataatgttgttcgtcaagggcatgtggtgaactcagaaagtaaagatgaaaatgtaaagggaattcgccaatttatgaatgctctggctcaagaaaaacgaatcagcgccacggctatacaaaccgttggaagtaaaggctatgatggattcattgtaggggttgttgaatgataaaacttgtattacacctaaaaagaaacggagacataactaaatctatccaatcaacagctagaagcaaatacatacatgaaacctacgttcatcatcatcctaaaaaaatccgaacgagctggattctcgaccaaactcgttcggattgtccttcaactaacatacttttgttccagactctttttaaaggggccccaatttatctgtcatttgtttttcggttaaaaaattaatcaattctcgtacagcgaatgaactgtagcgttcttttaacagaataattccaagttcccacatcatttcaggatctgcaataggcacggtagtaatattgggatctttcactttggcataaagcgattcgggtaaaatagcaatacctagttctgctgctgttaattcaataattaaatcccattgagaacttttatacgctatagaaggcacaaagcctgattttaaagcatcttgaattaaccggtcgtgcagcgtaaattcttcactgaacataatgaatttttcatgctctaattctttcatccagacggaagaacgttttgctaaaggatggtttctatgcgcgtataaaagaaatctctccttaacgaacgggtatacgtgaaaatgctcagcatgaccgcttgtaagaggaagcataacaatccccatatctacaagagcctcttccacaagtgcttcaattttttttgctccaaattcaataagctctagagatactttagggtattgtacattaaatgcttttgcaatcttcgggaaaaacaaggtcccgatgagcggagggactcccatcttgatttgccctgtttgcaagttcattaaatctcccaacaagtgaggcatgtcttttaacaccgacagagctttagttgcctgatgatacacgacttctcctgcatcggttagctttaattctcttgttgaacgatcaagaagctcaaatcctagttcattttctacttttttgacggctttacttaaagccgtttgtgacaaatgaacttgcagcgctgcctttgtaaaatttttatgattcgctacctctataaagtattctaagtctctgatttccatgtgaaactccatttctgcaaactgcttatcctttttctttactctttattttaaccactaaattatttactgtaaatgcactgattaaaaagggggaggatatctccaatgaataaaaacagggaaaggaaatgaactaaagtttctgtcgaaattgatttataaaacgaataatctttttatagaaaaaaatagattttgctactagctgatgaggaatataaagacttttgtatgtgcgctcgggcaaaaatgcaaaacttattaaaataactgaaagtccaaaggctgcggctgtaatctctagccaagaaaacatcatatcattcctccttttacaaacctattaatagaatatgtaaaagttcgaaaggaggttgtgcgatagccccataacgagcggggttatgaagttctctctaaaaataaaatgacgttaaagaacgcaggcgctgcgctctttaacgtcattttattttcgttcttcagcttgatgctcttgtttgttttgctcagtaagacgtttttgatgagcttttgtttcggcgcttacgtgattcgcatcattcggttgatttttctttgaacctcctgcagcgttactcattagacgacacctccagtccggttatgaaacatacctatagaatgtgcgtatttacagactttatacaccgctatagatattactgcacacgaaaaaagcaaagggagagtcactaagactgttccctttgcttttttactaggcgactttatcggtggtgataattttgttaatccagtcttttccttctgtaaaccttgtaacaagcatcgctgttactgtatttcccgtactgtttaaaagcgtagcaggggcgtcaataattgtggaaatgaccgcaataatgggcagaacttctggcgaaaatccgtaaattgtaataattaacatttcgccaatcataccgcctccagggattgctcccattacggctccaactaaaaaggctacgcctaaaatgctcaaaatactcgtagcagacgtcatatctttgccaaacaaactgaataagaaaacaatctttagaataccaccgataacagaaccatctttatgcgtgtttgctcctagtggaatcactgtttcagcaatatccagcggcacacccattttctttgttgcatctaaattgactggaatagatgcagcagaagaacacgtagcaatagcggtgatagaaggagcagctgcatttttccaaaacagcttaattcctgctttaccgccagcaatccatgcgtatagcgtaaagaaaccgaaatagtaaacgattgcaattaataaataaagaataaatgctctagcgtacccttgtaagatctttggtccaagttctcctactacagtagcaaaatagcatcctaaaccaattggagcatagtacatcacaactttaacaaccttcatcgatacttcttgacccgaagtcagaaattttgccataggttgtcctttttcaccggccattgtggtagcaataccgaaaataacggcaaagacaattaattgtaaaatatgctctttcgaaaataactgaacaaaatcaggtacagtaaatgtgctaacaagctgatttaaaagcgtcattttttcagctgtattttcactgtcacccatcaattctttaatggcagaagtatctacattatgtagcggattgtaaagtgatgcgcctaaaaagcctaaaacggctgaaacagcagcagtggcgacaaacacaacggcaattcctagcataattttaccaagacgtttcatttcgttcatgtttgcaatcgccgaagccacactaaaaaagacaaggggaacgataatcatgaacatcaaattgagaaacaaatcaccaaaaggcttcacgactgccacatcgggtccaatagcatatcctgctatcccgccaattaaaatagcgagaagcagaataagcgatgatctgtacgttttaaatacacttaaaaccatagttagatttcctccaaacaacaatagcttctttactacgcaagaacagctattatttgctcattgcatacgtagtaacgactggctttacatctttacgcaccaaatcttcgtatgtttctcgctctacagcaagacgagcttctccattttttacaaatacaacagcagggcgcggaatacggttgtaattgctagccattgaatagttgtaggcacctgtagaggacactgctaataaatctccttgattaacgcgcggtaaatcaatatcccaaataagcatatctcctgattcacagcatttacccgcaattgatactgtttcatcttttttatccgtcactctattagccaagacagcttcatgttttgcatcgtaaagagcaggacggatattatcggtcataccgccgtcaactcctacgtattttcgtacacctggaatctccttcgttgatccaattgtataaagcgttgtacctgcttctcctacgatgcttcttccaggctcaatccagacttctggaagggtataattctgttcagttaacgtgcggcttagcttttctgtcagtgcatctacataatactcaactggaagaggagagtcgctttcggtataacgaataccaaaaccaccacctacgtttaaaacttttacttcaaattccattttatcacgaatgctgaataagaaatcagttaaaatatcaatggcgcgagaaaaaccatctacttcaaaaatttgcgaaccaatatgacaatgaatgcctaaaagatcgtagtaaggcttttctaacgcagaacttaccgctttcatggcttggtcattggaaagaccaaatccaaacttggaatcttcctgtccggtcataatatattcatgtgtatgggcttcaatccctggagtaacacgcagaagaatagatgctttctgtttgcgctcagctgctaaggcatgcaaaacttcaagttcggtaaagttatcaacaacaaaacagccaatatttgcatcaagagccatttccacttcttcaatcgttttattatttccgtgaaaatgaatgcgttcagctggatatccagcttcaagcgctgtaaataattcgcctcctgagaccacatctagtgacatatcaagcttcgttaaaaggctagccatttccatacaaagaaatgctttccctgcataggcgatttgatatgaaaatccgcttcttcgaaaggctgaatggaaggccttgcatttcgtttcaattaattcttgatcgtagatgtatagaggagtgccgtattgttttttcagttcgaccgtatcgcactgcccaatttctaaatgattgttgctgttaattttactcgttccatgtaagtacataattcgtatccctccatttaaatcatttaactataactttgaactttgatggtcagtagaaaaacacaaaaaagacccgtgaagtgatgttcacgcgtcttggtttcataataataaagtattattacattctaggcatcaacatctcttcaatagctctccacaaaccaaatggtttgtgacagctcagcatttattcaatactgaaccagtatatgaacacaatggatgtttatatacttcggcacgaaatcccttttacttatcttcacagactccattagtctccaataagtgactcttgatttcatgcacctctattctcagagaggaaaattatatttaaatgtaattcctattatatttcctttttctccgtctagtcaatgaaaagttaaggcataggaatatcaaaaaaaataaataagaaagctatgaagcttccagatagaatccaagcagccagtgctgtcttctgatgaatgattaaaagtgagaacgtgacaatattgaagagaaaagaacacagcagcgaccatccataatgatgagtgatactgtgattaacataagcaatgaactcaatcacagtaaataaaagcgcccacaaaagaatccaccacaggctaccgcttacatgcagcggcagccttcctaaaaaaaccggtataacaaacggataaataattaaggttattccaagggaaaccattaggtgatcgggtagaaaaaggtgatcaataccaacagggtgaaatacccatacgcggtgatgaaacagcagcacttcataaagcaaattccccgtgacccaaaacagcaaagtaggatagtattcttgataccttcgccacttgccaaatagtaaaccaaggatgatgaaaaataatacaaatgaagattgcatgcgctctccttaaaataatggttatttctttttatttacatattatagaagttttattctctccgcttttattcagaaactataatagaaaagccgtaagaaacagcgttaaagacgtactaccactatttatggttttcttcaccctgctataatctccgtaaaggaacttttaacacttttgttcacgagatgaaaggagctatatgttaaaggccgaaggacgtaaaaataagctcaaaatagcttcacctagtatgtgacttctttttttgctatgctaaagttgcgtacatatagcatgagaatactagaagaaagaaaagggtgttttggtatgaaaacatacatcgtagttggagctgggatacttggagcttctacagcatatcatttagcaaaagcagaagcagatgtgacattgatagatcgcaaagatgctggtcaagctactgatgcagcagcaggaattgtttgtccatggctttcgcagcgtcgaaataaagcatggtaccgcttagcaaaaggcggcgctaagtactatcaaacattaattcagcaattagaagaagatggagaaacggatacgggatataagcgagttggagcaattagcttacatactgatgagcaaaagcttaaaaaaatggaagaaagagcatacatgcgtcgggaagaagctcctgaaataggcgagattacacgtttatccgctaaagaaacacaggctttgtttccggttctttcggaagaatacagttcagttcatattagcggagccgctcgcgttaacggaagagctcttcgaaacgcacttgtgaatgcagcgaagaaaaacggtgcaaaaataatagaaggaaacgcagaactactttatgaaaataatcaagtaacgggcgtttccgtaaatggacaaacccttctagcaagtacaacaatcgtaacggcaggagcgtgggcaaatcaattactagagcctcttggagtaaaatttttagcaagctttcaaaaagcgcaaattgtccacttgcatcttccagatttagataccaaagactggcccgttgtgatgcctccaagcgaccaatatattctttcatttgaacaaggtcaaattgtcattggagcaacacatgaaaacgacacgggttatgacttgagagtaacggctggggggcttcatgaaattttttcaaaggccttatccattgctcccggcttaacagaaagcacagtcttagaaacaagggtaggatttcgaccatttactccaggcttcttgccagtcattggagctcttccggcttatgaaggaatactagtagcaaatggtcttggggcttcaggcttaacgtcgggcccttatcttggttcagagcttgctaaattagcacttgaaatggaaatggaaattgatcttagcgactatgatgtaagaggagctatcgagtcttaagcaaacagaatgaatgaaaacaaatagaagttcgcaaactataactactatatgatgaaaggaagtagattgtttgcgaaagattatgataagtgcagcagcagcttttttatttatgagcgcgacacctgtattagcggaaaacaatcctcagccaaaaacaaaagacgtacagctgacgtctcagcaaaagcaggaactgtccgtgctgtacaaagaaatgctagcaaaaaagaaagaaatactttcaaaatatgtggagtacggcgtgctaagcaaaaccgagagtcaaaacatttcttcacatatggaaaatcgctatcagcatatggagcaaaatggttttgtgccaaagcgtcactgtcataaaatgcatcattcaaagtaattcctattcacataaaaaagcgcctataaaggcgcttttttatgtgaatgaatggaaaatattcgcttctttatctagtaaattttaaacacctcatgtaaaattaagagaatgagaacgagtaggaaagatgctagtgaggggtaggtaaatataaacgatgaacgaaaataaaaaaatagtccgattacatgcagaaaatcattcagctgaggatctaggaatcatatttgcttacaaacaaaaaggcgaccatcttgtttacagcatgtatcaaggagaaagcgtttctgagcaaaaaatacccctagaagaatgggtctcgtatgagcattttttcgaagcactaaacaaaaagaaaaagcttatgtacgagcttcaaataaatgataaacgctatgtagtaaacttaacccctttatcttacacagaaaagtctgaaattatgggacattgcgtgaatataattagttatcaggagaaaaaagaacagattcagccttttatttatcataacgcagatgctgttgctgtcgttgacttagagggtaaaacgcttcaagtgaaccctgcgtttgagaatacatttggctggacgtttgaagaaattcatcaaaagcctcttccgattataccttcgtttttaaaagagccagtgtgcgaacttcataagactattcaatcaggtgaatcgaaaacggaattcgagacggtcagacagcataaagacggtcatttaattaatgtaagcgtcacactattccgcgttgaaaacatgaatgattggccgctatgcattgcttttgtctatcgagatataacatcacgcaagcaggctgaaacggctttaaaagaaagcgaagaacgctaccgaagtttgattgagttatccccagaagcgattatcgtgcatagtgaagggaaaattgattacatcaaccctgcaggagccaaagcgctaggatgcaagaatcctcaggacgtattaggagcttgtgtttatcagtttgttcaccctgattactatgatgttgtaaaacagcgaatttatcgaatgaaaacagaaaataaatctgtagatttgcaggaagaaaagtttattcataaagacggtcatacgattgatgccgaaaccattgcctttcctattccctatatggaaaagcaggccattcaagttttgtttcgtgatatcacagagcgtaaaaaaactgaaaaattgctgcgtgaatccgctcagctttccttagtcggacagttagcggctggtattgctcacgaaattcgaaaccctctgacggcggtaaaaggatttatgcagttattaaaagaaacgagcggtcagccttactatgtagaaatgataaatcatgagttagatagaattgaattgattaccgatgagttcttgagtcttgcaaagccgcaggcgaaaacctacaaagacaaacatgtccaagatattttagagaatacgttaaagctagctgaggtgcaggggattacagagaaaattcacgtaaaaaaagaaattgattttcatcttcctctcgtattatgcgaagaaaatcagttgaaacaggtgtttagcaatatatttaaaaatgcagtcgaatctatgccaagtggaggaaccgtaacgattcaactaaaaaggtttaatcaggagaaccttgttgtccggtttagcgacgaggggccaggcatcacacaggaaagaatgcagcatttaggaaaacctttttatagtaccaaagagaaaggaacggggcttggactgatggtgtgttataagatcattcgagaacatagaggagaaattaactttgtaagtgaacttggaaaaggaactaccgtagacattcttttgccttttaaaaagtagattctacttttataagcatgaaaccttttctaaaggggaatacatgttagtgaacgaataatgaggttaaaataggagggaataagatggaacgcattgaaacgggagagatttttaccattttagatgaaaatgatcaagagcaagatattgaagtgcttggaaaaatgacgattgaagggcacgattatattgctgttgcatttgttgaagaagttttaattgaaacagaagaagaaattgatgttttctttttgaaaattgaagatgatggtgaatggtcctcaattgaagatgacgatgaatttgaaaaggtatcagccgtatttgaggaaatgacatccgcgtaaaaagagaggttaaaacctctctttttttatttttaaataatataatatttagaattttttaaaaaatatcttgctgaattatttcccttcatttatgatgaatatgtaacataccaaccggttagtaagtaaatgaaagcgaggggctaccgtgtatttttcttactctgacaaagtagtgaagctgcaagaagaattgacctcttttatggaagagcatatttacccaaatgaacggctatacgaacaacagctgaatgaacagccatctagatggtcagctgttcctccgatcatggaagagttaaaagaaaaagcaaagcaagctggattatggaacttatttttgccagaaagcgaatacggagcgggtctaacaaatgtcgaatatgcccctctttgcgaaattatgggccgttctattattggaccagaagcttttaactgcggagctcctgacaccggcaatatggaagtactggttcgatacggaacgtccgaacaaaaagaaaaatggctaaagccgctgttaaatggagacattcgctcctgcttttctatgacagaaccggatgtaggttcttctgatgccacaaacattcagtgcagtattgtaagagaaggcgatgaatatgtgatcaacggaagaaaatggtggtcttcaggtgcgggagatcctcgctgcaaaattgctattgtcatgggaaaaagcgattttaccgcatctaaatatgaacagcaatctatgattctagttcctttaaatacgccaggagttaaaattgaacgaatgctgccagtctttggatacgatcacgctcctcatggacatgctgaaattcattatgacaatgtgcgtgtgccagcgtctaatatgcttttaggcgaaggaaaagggtttgctattgctcaaggcagattggggcctggacgtattcatcactgcatgcgtttaataggagcagcggaaagagcgcttgaagaactatgtaagcgtattcaaaaccgctctacgtttaataagttgctttctcagcaaggggttattcaagaatgggtggcagaatcgcgtattgaaattgagcaagctcgcttattaacattaaaagctgcttatatgatggacacagttggaaataaaaaagcgcggaaagaaattgctatgattaaagtaatggctcctgctatggctttaaaagtcattgatcgcgctattcaagcatttggagcagcaggtgtttcagaagacacgccgcttgcggcactttgggcaaatgctcgaactcttcgcctcgctgatggtccagacgaagtgcacaaagcacagcttgcaagacttgagttaaaattctatcaagaaaaggaggcaacctatgcacataaaggatttgtttgatttaactgggaaaacagctattattaccggaggaggcagaggattaggagaacaaatggcagaagggcttgcagaagcaggggcaaatattgttctatgttcgagaaagaaagaagcatgtcagcaagtggccgatcgattggccaccatgggcgtaaaaaccctcgctttagcatgcgacatcagtcagcctgaagatattaaaaatgtcgtgcatcaaacgattgaaacatttggacgtattgatattttaattaataacagcggagctacgtggggtgctccggttgaagaaatgcctcttgaagcatggcaaaaagtgatgaatattaatgttacaggaacgtttttaatgtcccaagaagctggaaaacaaatgattaaacaaaaagctggcaagattattaacattgcttcaattgccggtcttggaggaacagatcctcagtacatggatacaatcgggtacaacacgagtaaaggagcggtcattacgtttacgaaagatttagctgtcaaatggggacagcataatattcaagttaatgcgattgcgccgggatttttccctactaaaatgtcaggtgcgattatggaacaaggcaaagattattttctaagtcaaacccctttaaaacgctttggctccgaagctgatttaaaaggagcatctgtttttcttgcttctgcggcgtccaattatattacgggagatattctgacagtagacggtggagttcatgctatgtgaataagaaaggagtaacttgatggaagacgttaaaaaatggtttacaccttatccagaagcctatactcacgacattcacatcgaagacatttcactatttgatatgctgaaagaaacagccgaacgttatcctgctcatacggcaacacgcatgtatcagcatacgctaacgtaccaggagctgtatcattcagttcgcgtatttgcaggagcactacagaaaaaagggattaaaaaaggagatcgtgtagcaattatgctgccaaactgtccgcaatatataataagctatttcggcattgcagcagcgggcggcattgttactcaggtcaatcctatgcttgtcgaacaagagctagagcatattttaaacgattccggggcaaaaaaaataattctgctcgatgatttttatacgagacttcaagagataagaaaccgcgttgatatagaagaagcgataactgtaagcttgcaaaaaccttttgttcctgcatcaacagacctttccttcctagattttttaaccataaaacatgaatttaatcagccggtcatccacccagcacacgatattgctgttcttcagtatacgggaggaacgaccggaccatctaaaggtgcgatgcttacacatacaaacatttacacaaacgcagttcaatcatacgaaatatttaagcatgatattgaattaggaaaagaaaaatgcttaaccgttattccattatttcatgtatttggtatgacttcctgtatgcatttatcgattctttgcggaaatgaaatattgctattgccgcgttttgatttgaaagaagtattaaatacaataaaaaaagagcagcctagtatttttcctggtgtgccaactatgtatgtcgcgattaccaatcatcctcaggcagaagaatacaacattgaaagtattcgcatctgcaacagcggcagtgcaccgatgcctgttgagctgatgaaagagttcgaacgaaaaacgggtgctaaagtgttagaagggtacggcttatcagaagcgtcccccgtgacgcattgcaacctgccgttttgtgagagaaagccgggtactgtcggacttggcgttccacaaactgcttataaaattgtagacgtggctaccggaacaaaagaactgccaagaggagagcttggagaaatagtaattaaagggcctcaagttatgaagggctattggaatcaacctgaagagacggctcacgcgcttagaaacggctggctgtacacgggagatattggacagatagatgaagacgggtatttatccattgttgatcgcaaaaaagatatgattattgcgagtggttttaatgtgtaccctcgagatattgaagaagttttatacgaacacagccacattaaagaagccgttgtaattggtgtgccgcatccttacagaggagaaaccattaaagcgattttggtagtgaaagaagggaaatctctttccaaagaagagcttacttcttattgtcgacagcaccttgcagcttataaaattccgcgaatctttgagtttcgcgctgagcttcctaagactaatgtagggaaaattttacgacgggcactacgagaagaagtggtgaaagaaacgatgtaaataagctgaacataaacaaactttttcaaaagctccctctaagccatggtataatttgtgaaaatgagaaaagacagagagggtttgacgatgaaagatttgatgatggaacgaagcattcagctttttgctcaaaaaggtttcaaagaaacgtcgattcaagatattgtaaatgaattaaacgtcacaaaaggaacgttttattattattttaaaagcaaacaagagcttttaatggatattcaccttcaatatattgaaagattaatagaaaaccaagaggcgattcttgcagataagacaacatcttatccagaaaagctgcacagtattatttttaaacttgttcatgatattgagaaagaaggtcttcgagctaaagtgttttttcgagagatgcgtcatttgagtgaagaacacttagaacaaatcatcccaaagcgcgatcgttttaaagaaaatgtacaagagatcattgaaaagggaatagaagcagggcagttccgttcagatttgccttcagatatcgtgacgctaggcatattaggaatgacaaattggagctatttttggtttcagccggatggagaaaaatcagatcgagaagttgcggctattttttataagatgctgatgaaaggtattgagtcatagtagctgctaggctagacagtgctcgtaaaaggcgggaaagtataagctctttctctccttttatattaaaaggaggctataacatgaatagtaaagatatacaccgtattgctgttattggagcaggacaaatgggacatcaaatcggtatgctttgtgcactcggaggatatgaaacaattattcaagatatgaatgaacaatcactcattaatgcaaaagacaagctggaagcaattataggcaagtgggttcagaaaggaaaaatctcttttgaggctaaagaagccgcatttcgaagattgtcttttacaaacacattaaaggaagcggtttcaagtgcggattttgtaattgaagctgtggtagaaaagttagatgtaaaacaaagtgtctttaaagaaatagatgagtacgcaccaagtcacgccattttagcatcgaatagttcaacaattgttaactcgcttattgcaagtgcaacaaaccgtccagagcaaatcgttaacatgcatttctttttccctccccttgtaatggactgcgtagaagttgtgatgagtgaaaagacaagtaaaaaaacagctcagacgacaatgaacgtttgcaagcaaattaatcgcacagcagtccttctgaaaaaagaaatctcaggttttattgctaatcgaattttaggagcgttgcaaaaagaagccgttttcctttatgaaaatggatacgcagattttgaagacattgatacgatttgcaaaaaagcgctcaatcacccgatcggtccttttgaattgatggatctctcgggaattgacgtcggatattttgtgatgcagcagcgctatagcgaaacgggagatccagaggacaagccagctgcgtgcattgaagaaaaagttcaaaaaggcgagcttggacgtaaaacaggaaaaggtttttacacataccacacacaaggagtgaagtaatgatgaaaaaatttgtacgtgttgaaaaagaggagaaaacggcaattgtaaccattgataacccgcctttaaatgtaatgagccagactgttgtgcagcagcttgaagaaacgtatgaagagcttagtaaagatcctgatgtcattacaatcattttaacaggagcgggcgaccgggcgtttatggctggagctgatattaaagagtttcctcagttaatggggcaaagcggcattaaagaagagtttatgaaaactcatcgtgttttgcaaaaacttgaaaacattcaaaaaccaacaattgtcgtgttaaacggtttaacgtttggaggaggatgcgaactttcactaaccgctgatatacgcattgccgaagaacatgctcaaatcggtcttccggaagtgaagctcggattgtttcctggaggcggcggaactcagcgtcttccgcgcgtaatcggcgtttctaaagctaaagagtggatgtttgccggcagtcctgtttctgcagaagaagcgcttcatgcaggctttgccaatcatataacgcctaaaggaaaagggctcgaaaaagcaaaagagctggctaagaaatttaaccgtcactctcttccgtcactttctcgaattaagacagcggtaaacgaaggaatgaatcgtacattatctgaaggtcttgaacttgaggcagagctgtttgaagaagtctttcaaacagaagatattaaagaaggagtatcagcatttattgaaaagcgtcccgctgttttttcacataagtaaaggaggagaagatcatgtatgaaacacaggtcaaagtgcgcttttgcgaaacagacgcactcggtcacattaacaatacgagctatttcatttatttagaagaggcccgtattgctttttttgaagaaatgggagcatccatgcatacaaaaaagtgggagtatattttagcgtctactaaatgtgattttgttgcgcaaggttattttaatcaagtgctaatgattaaaacctttgtatctaatgtcggcaataaaagctttacaattggtcatgaaattaccgacagcaagacgggatcgctgattgctaaaggagaagctgtcatcgtgtactttgattttgatgcacaaaaaagcgtgtctattccagcggacattaagcagtttttgatgaattataaagtagctgtttaactataaaaaagcaggtggtaaaagaatgtcacaaatcattcctgtacgaaaaggagaggaattaaacacggaaaaactgcatcagtttctccgtgtttcgattcctgatttacctaaagagcctcttttaatcaagcaatttggatcaggtgcgtccaatttaacctatgctctttcagtcggagagtgggaggcggtgttgagacgccccccctttgggccagttgcgccaaaagcgcatgacatgcaaagagaatacaagattttatctgttttatcgaagtctttccctctcgctcctagaccgtatgtgttttgtgaagatgagacggtggtcgggaaatccttttttttaatggagagaaagcacggtgttctcatcgacacagcgtttccagaagacgtgaaaggaactgacgaactttgccgttgtatttcagaacaaatggtggatgtccttgctcaacttcatgatgttccttataaaggcacgcttcttgaaaaaatcagcaagcccgaaggatttttagaacgtcaggtatacggctggattcatcgttatgaaaaatcaaaaacaagtgacataccggaagtagaagtcctaaaaaaatggttgaccacacacatccccactacacagcattcgaccattattcactatgattacaagcttaacaatacgttattttcaccggatggaaataaaattgtaggattatttgactgggaaatgacaaccgttggagacccgcttgctgatttgggagtggcgctgagctactggatggaagacagcgatcctgaacttttgaaaagaggactcggaaatccacctgttactgtgcaaaaaagcttttattcccgtcgagattttgtagaagcatacgctaaaaaaagcggacgggatgtttcacacattgacttttacctaaaatttgcgtacttcaagcttgctgtcatttgtcagcaaatttattaccgttataaaaaaggccaaacaaatgataaacggttttcacaatttggagattatgtaaaaacactaattattcatgctctgcacacagaacgaggacatatatgaaagggaaaattcacgtaatactcaaaaaagaagagcttctttccaaaaagctagaaggaaaaacggttgttatatttgacgtcttattggctacgtcaacaattgcggctgctttacagcaaggagcaatagaagttattccagtaaaaaacgaagaagaagcgcgtgaaaaagcaaaaacgtacaagcctgatgatattgcgcttgtaggcgaatatagagggaaaacgattgaaggtttttttgatccgaatcccagcacgttaaaggagcatgttcaaaataaaacggttattttgtccacgactaacggaaccgtagccattcataacgctgaaaaagcaaaccatgtatatacagcttcgcttttaaacggagaagcggttgccagtgctgtttgtcagcaaggtcaagaggaaactgttttattggtttgttcaggttcagccgatcgcttctgtctagaagatttgtatggagcggggtattttataagctgtctgctgcaactaaaaacatttcatttgacggatgctgcaaaagccgcactgcttttgtatgaggcttatgagcattcacctgttgaaatattgaagcgctcagctataggagaaatgctcactcagtatggctttctaaacgaaattggctttgtaagccggaaaaacgtctattccgtagctcctaaggtagtgaaaaaaaagctagtaaacgggggggaaacgatatgtctgaaatgaaaacaaaagcaaaaggcggctcatttttactaaaaaaaacatctacgcatcacgtttatacacccgaagacttaacggatgagcaccgtatgattgctcagacagcaaagcggtttattgaaaaagaagtagacccttaccataatgacattgagcagcaggattttaataaagtagtagaattgatgcataaagcaggcgagcttggacttcttgctcacagtattccagaagcatatggaggactaggtcttgataaagtaagcaaaggactcgtcggtgaaatcattggccggacaagcggatatggagtcgctcattctaatcatacatgcattgcgacacttcctattacgtattttggcaccaaggagcaaaaagaaaaatacttgcctaaattggcaagcggcgaatatattggggcctactgtttgacagagccagaagcaggttctgatgctcttgcagcccaaacaaaagccgtattaaatcctgaaaaaacgcattatgtattaaatggaacgaagcagtacattaccaatgctgccttttcagatacgttcatcacgtatgcaaaagtagacggtgaacattttaccgcttttattgtagaaaaaggttttgaaggactgtctctcgggccagaagaaaagaaaatgggaatcaaagggtcgtctactcgtccagttatttatgaaaattgtttagtacccgtagaaaacgtacttggacaagtaggaaagggtcacttgattgcgttgaacgtcttaaacctcggacgttttaacttaggttctgcatgtatgggcgcagcgaaatatgcgtttgaacttgctttagcttatacaaaagaacgcaagcagtttaaaacagctattgcggaatttaatgcttcaaaagaaaaaatagcaaaaatggcggctcgtatttttgcatctgaatctattcagtaccgtacatccggtttactagaagaggcgcttggtggcttatatgaaagtgaaaatcataagttagtagctaaacagctggctgaatttgcaatggaatgttcagtttgtaaagtgtacggatcggaaactcttgatttaattgccgatgaatcgctgcagcttcatggcggtgcgggggttattcaagaatataaaatagaacaagtatatcgtgactcacgcatcaatcgtatttttgaaggcacaaatgaaatcaatcgccttttgcttccaactcagcttctaaaaaaagcagacaaaggagaaatagagctgagcaaacaagtagaacatgctgttagtgaattgatgagcggtcagtgggaaatatcttcaaatgaacttctagcaagagaaaagcaggcggttattaccacaagacatttatttcttgctttgttaggaacagcattccaaacgtttaacgccaatctagcacaagaacaagaaatgctgatgaagctcgcagaaattgctattggactattcgctatggagtcatctgtgctgcgcgcggaaaaagctgtgaacaaaaatggagaagaaaaagaaaagttaaaaagcaagctgtcagcaacggttgttagtgaaacgctctttgaaattgaaaagcaggctcgacaattaataaacgggatgttaacgggtgaaaaacaccgacagtaccgcacaattcttggaaaatggatgaatgatttgcaaagtgaaggagagttcacgcgcaatcgaggcattgcccgtgaatttatcgacagcgggcgatatgttgtataaggagggatattatgcgttttgaagggcaaatagctgttattacaggagctggaagcggcattggagaagcgaccgctcagagaatggcgaaagaaggagctcacgtcattcttgtcgggcgaacgaaagaaaagctagtacaggctgcatcggctattgacacacggtgtgaacgaaagtgcacggatattttccccgctgatgtaacgaaagaagaagacgtcaaagagctggctgagtttataaaagaaaagtacggacaaattcatttattaattaataacgcaggcggatcagttaattcaacaatcaaagaaacaacgcttgaacagtggaaacacgtgcaggacgtcaatttaacaagcgtatttcttgtcacaaaacatttgattccttttttaactgaagaaataggaggaaatcgatctattgttaacatcgcttctctttcaggacataaagccggggcacaaatccctcactacagcgctgctaaagctgctttaattaactttacaaaagcaatggcgtttgagttagctccccgtggagtcagagtaaactctgtgtctcctggattcgtagaaacacctttaacgcagcctggacttgaaaatgagcgcttcactaaggcaatcgaaaaaaatacggctttaaaacgtgtaggtaaaccagatgaaattgcaaacgttattgcttttgcagcgtctaaagaggcatcttatatgacaggaagtgatttattagtagacggtgggtggcttatcgtttaatgcaaagtaaagaggagggaatctggattatgagtgatttagtagtagaaaagcacgggactattttatctttaacgttaaatcggccggatcgtttaaatgcattcagtgaggaaatgattgaaaagttaacagctgaaataaaacaggcgcaaagcgatgagtctattaaagtggttatattaaatggagcagggcgctcgttttctgccggaggcgatgtaaaaacgatgggccaagcatccggatctgatgtttatgaacatatcggtcgtttaaatgaatgtattttagcgatgcaaaatctagagaagccaattatttcagcagttcatggatttgcagcaggagcggcttttaatttagctctcgcttctgactttatcattgcgtcagaagaaagtcggttcgtattaagcttttctcaagttggattgatttcagacggaggaggcctttactttcttacaaaggtcgttggtccccatagagcgaaggaactattatttttaggagagcctatggatgccgatacggcttacaaagctggttttttaaaccgtgtagtaccgttaaatcagctgaaagatgaggtcacatcctttgcaagtcgcttatcacaaggaccaaccaaagcgtatgggaaaatgaaaaaaattgtcaacgattcctttcatttaacattagaacaagttcttgaacaagaaaggctaacgcaagttcttatggtagaaacaagagatcatcaagaaggaatatctgcgtttaaagaaaaaagaaagccactatttcaagggaaataagagggggatataagatgaaagccattcaatttacgcagtacggaggacctgatgttcttcaagttatcgatattgcacgccctgtaccaaaaaagaaagatgtgctcattaaagttgcggcaatcggcgttaattacgccgacgctgcacggcgtgaaggagcatacgtagtcgaaacaccgctgccttttatcccaggctctgaagttgcgggcgaagtggttgaagtaggcgaggatgtaaaagggataaaagtaggtacaaaagtcgtgacgctgctgggatctaatcgagcaacaggatacgctgagtacacgctggctgactcaagaggtcttattcctttgccggagaatgtggatttaacacaagcggttgctttgcctcttcaaggactcacggcttatcatattttaaaaacaatgggtcgccttgaaaaaggagaaaccgtcattgttcatgcggcagcaggcggcgttggaaccttagctgttcagcttgccaaaatttttggagctggaaaagttattgctacagcgagctccaaagaaaagcttgagcttgcaaaaaatcttggagctgacgaagcgattaactatacagaaacaggctgggaaaaacaaattttagaagtaacggaaggaaaaggggccgatattattttagaaatggtaggagggcatatattctatgaatctcttcaatgtcttgcaccatttgggcgcctcgttttttacggaatggctagcggaaaacctgtaaaatttaaccctgcccgcctgatggaaaaaaatcaatcggttctaggctttttcttacctcaaatgatggcaaaaccaacactttatcagcaaagcctgcatgagctattaaactacgtaaatgccggtcagttaaaattaatgctgggcggcacattttcacttgatgaagcggcagatgtacatcgtctgcttcaagggagaaaaacgaccggaaaattagtattagttccttaacaaaacagcttccgtctctaatagggacgggagctgttttggtttaaaaaattggctttcacctgccaaatttttaaaaactgcttaataatttggcataaaaatcaatgttttttactaatttcttctatattttaacactggcatggaagttgcataataagtgtttgaacatataaaggaggaattgaatatggtgagaaatggaacggaccgcgtgaagcggggaatggcagagatgcaaaaaggcggcgttatcatggacgtgatcaatgcagaacaggcaaaaattgcagaggcagcaggcgctgttgctgttatggcgttagagcgtgttccagctgatattcgtgcagcaggcggcgtgtctcgtatggcagacccaacaattgttgaagaagtgatgaacgctgtatccattccagttatggcgaaagctcgtattggccatattgttgaagcacgcgtgctagaagcaatgggtgtagactatattgacgaaagtgaagtactcactccagctgatgaggaatatcaccttaacaaaagtacatttacagttccatttgtatgcggatgccgtgatttaggggaagcagcaagacgaattggtgaaggtgcttcgatgcttcgtacaaaaggcgaaccaggaacaggaaacattgtcgaagcagtgcgtcatatgcgccaagtaaacgctcaagtacgtaaagttgtaggcatggatgaagacgagttaatgacagaagcaaaactattaggtgcgccttatgagctattactgcaaattaaacatgaaggccgtttaccggttgtaaactttgcagcaggcggcgtagcaacacccgcggatgcagcgttaatgatgcagcttggagcagacggtgtgttcgttggatcaggaatcttcaaatcagacaaccctgaaaaatttgcgcgagcaatcgtggaagcaacaacgcattatcaagactatgaactgattgcaagcttatcaaaaggattaggaagtgcaatgaaaggaattgaaatttcatcattattaccagaaaatcgtatgcaagaacgcggctggtaatgagtaataacttttaaacttagttaggagaatgatcatggggaaatatacgatagtcgataaagaaacgtgtattgcgtgtggtgcatgtggagctgcggcacctgacatttatgattatgatgatgaaggaattgcgttcgttatacttgatgataatcaaggcacggctgaagtgccccaagagctggaagacgatttaatagatgcgtttgaaggctgtccaacagagtccatccgtatagcggatgaaaaatttgatggagactcgaataaatttcaataaagcggaataaataaaaaaatagaaagtttttttaaaagaaaagaaggattttgtctagaaaaggcgaaatattagttatgtaagaatatatctttttaaaaatgaaagcacttacataactaaaagcatatgagttaatctcatttgacctttcagaattattagtgtaaaagtgcggagtaattaaatagtttttaaaaggagattaaggggcatgcaaatactgaatacagtcattgtgacaggatatgcaaaagctccacagggaacttccatgtatgaaatgtataagcatgcgggaattgtactagaagtggatctgacagagcataaaattgtaaatgctgagtttacgtttattacggagctgacgcaaaattttttccggaagctgcttattggttactgccttgcagatggaattgaacctcttattgaacgtattcaaaattattattttgctccatctcaacaggcgattatcgtagcgcttcaggctgcaatccaacgttactgggataatgtgaatcaaaaaattacatagcgtttggttagaataaagtgagaagacaacctcttttcatggtcttattaaagccaagcagacacacacactttacaaagagtggggacatccctgtttctttggggagtcattgtgtcctgcttggtttttttcgcgtaaagcgctgtgaaatataaaaagaaaaggaggaaacaaaatgaacaaaatcatcacgcgcgaagaagcaatagaaaaaataacagatggcgcccgcattatggtaggtggatttggtctcgttggaagcccgcttagtctgattgaagcgattgccaaatcaaaccttaaagatttagagattattagtaataacctcggtgaacctggaaaaggattaggtgtattggttcaaaaaaaacaagtaaaaaaagccataggttcttattttacttccaaccctgaagttgtacatgcttatcaacaacaagaactccaagtggagctcatcccgcaaggaacaatgtccgaggctattagggcaggaggagcaggcatcggaggattttatacgcctgtgagcgtagggactcagcttgcggaaggaaaagaagaacgagtattaaaaggaaagaaatatgttttgcaagaatcgctgcatgcagatgtagctctaataaaagctaaaaaagcagatcgactcggaaatcttatttacagcaaatcagcgagaaactttaatccaatgatggcaacggcagctgatatcgtgattgctgaagtagaagaagtggtggaagttgggcagatttctcctgaagaaattgtaactcctcatttatacgttacttatatcgtagtgaaaggagaacaataagatgaacgtcaaacaatatattgctgcgcgtgctgcaaaagagctttgtcacggagatgtagtgaacttaggaatcggcattcctactttagttgctaattatatttcacccgatgttcacgtgtttttacattcagaaaacgggattcttggcgttggccctactcctgaagaagattatatagatccagaacttgtgaatgctggaaagctgcccgtcacggttttggaaggtgcctcattttttaacagcgctgattcctttgccatgatacggggaggccatgtgaatgtatcgattcttggagtgcttcaagtagatgaagcaggccgaattgcaaactgggctgttcctgggaaaagtgttcttggcgtaggaggagcaatggatttattagaaggctcaaaaaaagttattgttacgactcttcatacgaacagccaaggagagtcaaagctagttggggagttaacttatccgcttacttcagagcgacgagtcgatatgattattacggaattagctgtcttttcggtaacagaccttggtcttgaacttcttgaaacagctccgggtgtttctttagagacagtgcaacaaaaaacccaggcttcttttcgcgtctctaaattatttaataaaaacaatgaggtgacagcataatggcagtgattgtaaatgcatttcgaacgcctattggaaagtttggcggttcgcttgcagatacgcttccagaagaactagtctctcttgtgatgaaaaacaatttgtcttcagcgggatatacttcagagattgttgatgaaatcattgtcggacaaacgaaacaaagcgctcatgctcctaatatagcgagagtagccgggctgaaagctcaattctctgaacgtattccagcttataccgtgcaccgccagtgcggttcaggcatgcaggctgtaatgaatggagctatgtccattttatcaggtcaagccgaagtggtattagccggaggagtggaaagcatgtctcaagcaccgcactatacggtaggcactcgttttggttttcacgttggtgatttaacactctatgactctaatacagaaagtcagccaaaatcacagcctgaaacgttatacggaacgtttacgatgggacagacggccgagtggctcgctgaaaaatatagtattagccgcacggaacaagatgagtttgctttttatagtcaggaaaaagctaggcgggctatagaacttgatttgtttgaagaagaaattatcccggtacctgtaaaagaagggaaaaaaggtatgaggcattttgcaacagacgaatttcctcgtcttactagcaaagaaaagcttggtgcgcttaagcctgtttttcaaaagaatggaacggtgacagcaggcaattcatccggcagaaacgatggcgcttcaatgatgctgttgatgtcggaagaaaaagctgagcagcttggattaacgcctatggcaaaggttgtgtcgtttgccgcagcgggcgtctctccaaaggaaatgggaattggccccgtttctgcttcgcaaattgctttaaataaagccggtttaagcttaggtgatatggacttgattgaattaaacgaagcatttgccgctcaaagtattgcttgcttaagagaatgggacatcacatcagaaaaagtgaatgtaaacggaggagcgattgcgcttggacatcctttagggtgctccggggcaagaattataacaactctgtgtcatgagcttcacaagcaaaaaagacgatacggcctggctactatttgcgttgcaggaggattaggaatggcgatggtggtggaaagatggacgaaataaaaagagattatgtttttcatagagatttaacaaaaaagtatccaatgattacgcatggtgaaggaagctacttaatagatgaacaaggaaaaaagtatttagacggctgctccggcgccgtggcggcaaacttagggcacggcattgcgcaaatagccgaggcgatggctgagcaggcaaaaaaagcggcgtttgttcatacattgcgttttgaaacggatgttttgcataaacttgcaggggtcattggtaaaatggcgccgcttcatttaaacaaagtctattttacatcaggaggatcagaagcaaatgaaagtgcattaaaattagcaaggcaatatcacagagatgccggaaagacgcaaaaacacatcgtaatcggaaggtggcagtcttatcacggaaatacgataggcgcactatcagctggaggagacgtaaaaagacgatatccgtatacacctaatcttttacattttgcgcacgtttattcgccgtattgtcatcgctgtccgtataatcgcaatcaagaagactgcgtggcaaatcaaaactggagctgtgtcaccgatattgaacgaaccattttagagctcggtccagaaaatatttcagcttttatcgcagagcccattgtaggaagtcagcaaggagctgtcgtacctccacttgactatttcaaaaaagtacgtgagctctgcagccgctatgacattcttttaattattgatgaagttatgacaggctttgggagaacaggaactgattttgcagtggaacaattcggaatcgagccggatattctaacttttggtaaaggagtttcagcaggatacgctcctttaggaggaatgattgtccatgacagtctgattcaagggctgttagaaaatagcagcgggaaatttcttcatggctatacgtacagtggacatcctgtttcaatagcggcaggccttgctgctttggatatgtatgaagaaatgaatatccttcaaaacgttgaaactcaaggcgcgtatttaatggaatgtttagtagcgctccagcgcaagcatccttatatttcagatattcgcggccgcggacttttaattggattagaactaatgaaagacgccaatcaacagatatttttcgagccacgtgaagcagccagcgaaaagctcaatgaaatttgtatggagcttggaggcgtcttttatccaggatccggatctatagatggacataaaggagaacatatcattatcagtcctcctttaaatataacgaaatcagaagttgatgaaatagtgagattgctagatcatgcgttttctattttttatcagcacataagaaaggatgagtcatatgaaagtgcaaaataaaacggaagagcttcaaatcaaaggaaaaaaacatttatcaccggtgatgacaagagtaacagagcttgttattgaaaaagcgcacggtgcaaaattttggacagctgatggcaaggaatatattgattttgtatcaggagtagctgtcaatgcagtgggtcatacgcatgaaaagatggtagaagcgataaaaaaacaagcagatcagctgcttcacctaggcttaaactacggctattacgaaacagcagtgaatttggcagaaaaacttgcgcaaattacgcctggaaacttagatacggttttcttttcaaactcaggcgcagaagccattgatggagcacttaagttagcaaaagcggccactggcagaccagcgattattgctttcgaaggttcttttcatggccgtacattaggagctacagctattacagcttcaagctctaagtaccgaagctactacgagccgattttaggagaagtgtatcacgcgccttatccgtatccaagtcagcttcctaatgttgacgaggaagaagcagaagcatattgcttaaatcaactgcaaaagctgtttgaactgcgagtcgatccttcacgcgtagcggcgattgtaattgagccagtcatgggcgaaggaggctattaccctgctccttctagctttttacgcgcactgagagacatagcgaatgattatggcattctgcttatctttgatgaagtgcaaacgggatttggacgcactggaaaaatgtttgccgcagaacatgctggagtcacaccagatattttagttttagcaaaagctctttccggtggtatgccactaggagcgattgtagcaagccgagaactgcatgagaaatggccaatagctggacatggttctacttttggcggaaatccagtatcgtgcgcagctgctttagctaatatttcaatcattgaagaagaaaagcttgtagagcgcagtgaaaaagtaggtgccgatattgtgaaacgtcttcagcattctatcggacatttaccggctattaaagaggttagaggaatgggtatgatgatcggcattgaatttcatgttgaaacagcagctgcttatgtccctgttattaaatcaaaagcgctggaaagaagactgcttatcatgaactgtggagtcaaagggcaaactattcgcttaatgctgcccctaaatattgataaagacgtgctgaatcaagggctgtctttattagaagaagtcatcacagaagcagtttcaattaactagctttttaaatgaaaaggagggtaacaatatgagtcaaactaaaaccgaactgctgcaaggaaatttatatattaacggcgagtgggtaagtgaagaggagcaaacctattttgaaagtataaaccctgcaacacaagagctcgtcggaacgtgtgcagccgctacggctagtcaagtcgatgctgcggtaaacgcggctagtacagcctacagctactggaaaaatacatctattcctgaacgtgcagcatttttaacaaaagcagcttcgctttttgaagacagaaaagaagagctagctcaagtgatgacaaaagagatgggaaaaccgctgacagaatcaataggcgaagttggtgtcgtcattgcaacagctcagtatatggcgggagaaggaagacgtttgtttggcgaaatagtgcctgctggctttcctgaccgagatataaaaatggttcgcgaaccgcttggagttgtagcatgtattacaccttggaactttcctgtttctctcgcttcttataaagtgtttgccgctttaatcgctggcaataccgttgtctggaagccggcttcagaagtggcgctctcagcgaagatttttatggaagtattgcacgctgcggggcttccaaaaggaacaattaatttgcttacgggatcgggcagaatcgttggacaaaagcttgctacgcactctgaagtgaaaatcatctcatttacaggttctacggaagttggtcagcagttagcagaaatgagcagcaaaaccttaaaacgaatttctttagagctaggaggaaaaaacgcggttatcgtattaaaggatgccgatctggataaagcagcagaaggaattgttaaatcagcatttacgacaacggggcagcgctgtaccgcagctagcagagtcatcgtggatcgttcagtaaaagaagagctgttgaaaaaagtaatagctcttacagaagaaatgaagattggaaatggtcttgatgaaggggttgtgataggaccgcttgttaatgaacagcagtgtcgtttagtagaagattacgtacaaaaagcgttagaagaaggcgggaatattgcgcttggaggtcgtgctttatcagaattaggggcttgttattacatgcctacaatcatcgataacgtccattcgaatcacacaattgctcaagaagagatttttggccccgtgcttgcttttattgaagtaaatggctatgaagaagcaatgagcgtcaataatggaacgatgtacggactttccacttctatttatacaagaagcttacattatgccagccgagcggcgaaagacgctgttagcggattagtctatatcaataacggaacatctaatgctgaaatgggagtagcattcggaggaatgaaaatgtctggcaacggccacagagaagtttctcatcatgcatttgatgtaatgacagaatggaagtctgtctacaccaactattaatctcgcaccttagcgaaaaggaggagcacatgtcttcatatcgcattggcattgcctttttttatcatgaatctcacagctttagtccgttaaaaacagaaatagaacagtttgtacaagaaggatattttgttggaacggaaatatataaagcatattcaggaaccaaaacagaagtagggggatttttggatgtattaaagcaagagaagcaagtagaaatcgttccccttgtttgtgcagctgcagttccgtctggggttgtatcttcggcggcttattacacaattgaaaagcaaatgctgcatgcgcttactcacgccggcccgctagatggcttgttaatcgctttgcacggcgcaatggtagtagagcatcttttcgatcctgaagctcatttgttaggtcaaataagaagctgtataggaaatagcgttcctattgctactacgctcgatatgcatgcaaatgtcagtgaagacatgcttacgtacacgccgcttcactttggttttaaaacatatcctcatgttgatatgtacgaacaaggagtcaacgctgcgcgagcgcttttaacacaaataaaagaaagcgctgtctattatgcgtctttaaaaaaattgcctatgctgttgccctcaattaatatgcgaacagcagaaggccctatgaaaaaaatgattgaccttgctaagcaagctgagcaagaagaagacgtatataatgtttccgtttttggaggctttccatattccgatattccaatcgccggagcaagcgtgctcgtagctgctttgaatcctgaaaaagcagaaaaaacagcaaataaactagcttctcagttttggaatataaaagaagaatttatagtcgatttgcctaccgttgaagaaggtctgcaaacagcgttaaaactatccaacacaaagccgacagtgctcgctgatatagcagataatcctttaagctgcggaagcggcgatacaacagaacttttgaaatacatgctgaagctaaatatgtcggggacactgtttggaggtctttatgaccctgaatctattaaacaatgcgtgcaagcaggagttgggaattacgtctctctttccttaggaggaaaagtttctcctgagtttggaaagcccgttgaagctgaagcaaaggtcattggtttatcagaaggtgagttttacaattcgggaccgtttaatcagcatttgaaagtaaatgtaaaaggtgcagctcatattcgagtaggagaattggatattttgctgattggaaggccggtatcagcaaacgatcctgaactttttcgccatattggcattgagccaacgacgaaaaaaatcatcggtttaaaagctaaaaatcatttcagagccgcttttgaaccgcttgtaggatctatcatctatgtggatgctccaggcgtagcatcaaatcgcttaacgacctttaattatcagcacattccaaagttaatctggccgctgcaagatgtcaaatatgaaagtgaaaaaaggaggaaagaaaaatggatgcattaaaagagcagtactatatcgaagtgccggaatcgttaaatccggagcagcaaaagatgatgattgaacttgaaaaagatgcgtttccgggcatgggagccgttgatgaacagacgcttgtacctttagcgcgctacggcaagcttattcaatatttccaggaaaatgacgcaaggccaattgccatttgcgagctgcttcgagattacaaagatgtcacaaaagcttatatctttggtttctacgtccgatctgataaacaaggaagcggaattggacagctgtttttagaagaaatattttcgattctaaaaaaagataatttcgaaagcgtttgtttgactgtgaatgtaaaaaatgaaggggctgtgaagctgtataaaaaaatggactttaccattaaagaaacgcgagcaggagagtttggcgaaggagaagatcgctattatatggtgcggtcaatttcttagtagaacatctattcaaaaaataaactttggagggaatataaaatgaacaatacgttatataaagcaagcagacactggaaagaaatcgagctttggaaagatgtaacggacgagcagtggaacgactgggtatggcagctgacaaacacgattaaaacattggaagatttaaagaaagtgataaatttaacacctcaagaagaagaaggtgttaaaattgcaaccaaaacgattccgttaaatatcactccttactacgcatggttaatggatgagaacgatccgaaatgtccaatcagaatgcagtccgttcctatttcagaagaactgcataaaacaaggtatgatttagaagatccgcttcatgaagatgaagattcaccggttcctgggttaacacaccgttatcccgaccgcgtgctgtttttagttacaaatcaatgctctatgtactgccgctactgtaccagaagacgtttttcagggcaaattggcatgggggttccaaaaaaacagctggatacagctattaattacattgcagccaaccctcaaatccgtgatgtattaatttccggaggagacggcctattaatcaatgacaatattttagaatatattttgaaaaatttgcgcgatattccgcacgtagaaattattcgtatcggtacaagagcaccggtggtgttcccgcagcgcattacagaaaacctgtgcaatatcttgaagaaatatcatccggtttggctaaatacgcattttaacacatcaattgaaattacagaagaatcaaagcgtgcttgtgaaatgctttcgaacgcaggagttccagttggaaaccaagcggttattttagccggaattaatgacagcgtgccaatcatgaagcagcttatgcatgatttagtaaaaattcgcgtgcgtccttattacatttatcaatgtgatttatcagaaggaatcggccatttccgtgcgccgatcagtaaagggctagaaattatggaaggacttcgcggccatacgtccggctatgcagttcctacgtttatcgtggatgctcctggaggaggcggtaaaattccgctgcagccaaactatattatttctcaaagctccaataaagtggtgcttcgaaactttgaaggtgttattacatcttatccggagccgcaaaattaccaaagtggaagcgcagaagaattttataaaaaagtatatcctgaagtatttgaaaaatttgaaagcaacggtgttctttcaattattgatgatacaaagttcaacttaacaccggaaggtctaaaccgtcttgaccgccggaaaacgtatgaccaaaatccagagcatagctctttgaaagacaagcgtgaaaagcgcgatcaattaaaagagaaaaaatttgaaacgcaaatgaaaaaatacgaaacggcgggagcgaaggaggaataatattgaaatgtcaatggtgcgaatcctatgaagcgaaagagacggatgcaacggtttattgggagcttcctgacggcacaaaagctatagaaattaaagagacgccttccattacatgttcagaatgcggaattacgtatcaaacagatgaaacggttggacacattgaagatcaactgtttttaatcaacacttctgccttagaaaaaagtgtaacgtacgaacagcttatgagcctgcctcgtctattaaaacgaaactattttgatttttcaaagtaagcaatgaagggtccatctcctgctttttgtgggagatggatattcttatacgctttacgttaaacatgtgcgcatagttcatttataaaggtgggataagtatggaagcggtcgatataaatcgtaatgaagaagaaaaaaagcaggacgataagcatataaaacgccatttaaaagcacgtcatatgaccatgattgccattggaggatcaatcggaacgggcttatttcttgctaccggatcatccatccaaactgccggacctggaggagcgctgattgcttacggggccattggaattatggtttactttctcatgactagtcttggagaaatggccacgtttatgccggtatcaggttctttttcaacgtacgccagtcattatgtagacccagctctcggctttgcgctcggctggaactactggtttaactgggctgttacgctcgctgtagaaatagctgcttctgctattatcatgaagttttggttccctgatgtgccaagtattatctggagcgctttgtttttaggcttaatttttttacttaatttcctatctgtaaaaagctatggagaatctgaatattggtttgctctcgtaaaagtagtaaccatcattgtgtttatcggagtgggccttctgacgatctttggcattttcggcggtgaatatatcggctttaaaaactttacattagaagaagcgccggtcaacggcggatttctgtccgtactaagcattttctttatcgcgggattttcttttcaaggtacagagctagtcggcattgcggcgggggaaagtgaaaaccctcaaaaaaatataccaaaagccattcgccaagtcttttggcgcattcttctattttatattgcagccattgctgtaattgggctcatcattccttacacaagtccatctcttctaggaggagatgtggataacattgctgttagtccatttacgcttgtttttgaaaaagcaggaattgctgcagctgcttcagtgatgaatgctgttattcttacctcggttttatcagccggaacttctggcttatatgcttctacgcgaatgttgtggtccatggcaaatgaagggcaagcgcctaaagcgcttcgaaaaattaatcgtcgaggaattccagtaaacgcgcttgttttaaccactatcattggcggtcttgcctttttaacatcaatttttggcgatcaaatgtatatgtggcttttaaacgcttcaggcatgagcggatttattgcctggattggtattgccgtcagccactatcgttttcgaaaagcatatgttgcttcaggaagagagatagatgaactggcgtataaagcaaaatggtttcctctaggtcctgttcttgcatttggaatgtgcctcatcgttattctaggacagaattatcaagcggtactttctgacaaaattgattggtacggcttgacggtctcatacatcggtctgcctctctttttagcgacgtggtgggggtataaaatagcaaagaaaactaaggttgtacctttgcatgagtgtatccaaagagaagataagaaataaaaaaaccaaagtggctaacgacaaagagaaaaggtgaacctcggacagtggggttcatcttttctctttataaaaatcgattattttacgctttgttatatagatatcatagcataaaaagtgatttttttccagtctggtttttattttatttattgataaaattcaagaataacgttggaatctgcacaattatgggaggttaaaaccttcgtaactttaataggaaaaggggtttgtgatgagaatttcagaaggtgttgaaatgctacagttgactgccagagcttttgaccaaaatataatattaaatcctacgttagtttggaataacgatgaagctattctaattgatacaggaatgcctgggcaaaccgatcaactgagagaggccttaagtgaattgaatatatctattgaacagctaaaagtaattcttctaacgcatcaagatctagatcacataggatgtgcgactgatatacgaaaaaaatcaaatgaaaatattatcgtatatgctcatgaatttgataagccgtatattgaagggaaacttccgcttattaaaacgaatgcgagtcaaatgagtaacgaagaactagcagctatacctgatgaaataaaatctttttataaaaaccctccaaaagttgacgtagatatagtattaaaaaggagtcaaatgctcccatactgtgaaggcattgaaccgatttttacccctggacatacgcctgggcatgtaagtttttatttaagaaaatcaaaaacactggttgctggagatgctttagtgttggcaaatggacgattaatgggacctgttaaacaaacgaccttaaatatggaccaagcagttcaatcactagaaaacttcttacactacgacattgagcatgttatttgttaccatggaggttattttcaaggctgtccgaaagaagcaattttaaggataaaagaacacattgcacagctagaaagttaaggggaaatgaacttgttttttgctagaagaaggaagggaaaatagaaaccaaaggggatgtataaaatgtttacaccaactatcagtgtccgaaaaataaatgataatctcattataaaatggcagctttcacactttacgattccgttagaagacattcttgaagtaacggaagatgacacgtacgggggtaaagaagcaaacgccattcgaattggccctccgtacggaaccactgaccgcatctttataaaaacgaccaataaaaactatctgttatttacctcaaacgcaccggctatattaaacgaaataaattcataacgatcattgctaaatacgagatatataggagagaaaaaattgaagattagccgtaccttcgatactggtaaaattgccaagcttaatcagtctgttcatcaactgcatgtagaattataccccgagcgctttcaaacatatgattttcagaagatacatgaattttttaagaaagtgatgaaagacgatagatttatctttcttttaggagaagatgaaggtcagcatgtaggattcgcttggctggaaataaagcagtattcagagacagtgtttaaaaagacttacaagtcaatttatcttcatcaaataaacatcgcagaaccctataaaaacagagggtttggttcgagtttgatgaaagaaatttatagcattgctcgtacaaacgacatcaatacaattgagttagattattggaatgataatacgattgccgaaagcttttacgaaaaagaaggatttgttacgtatagaaaaatggcttataaagaactttaaagagagcatttacttgctctcttttttatatctaagaagccattttcttcgttttaattacttaataaaataaagtacgcgatttgagaacttaactcttgaaaaatttttgttttacatttatacttacattcttgttcgcgtaatgcgacaatttattttatattcaactaggaggtatacagatagtatggaaaatttcatttatcataatcccacaaaattaatcttcggaaaagatcagcttcaagcattatcagaagaactcccgaaatatggaaaaaatattttacttgtatacggcggaggaagcattaagaaaaatggtttatacgatcaagttcttacgctgttaaaagagttaaacgtaaatatacatgagttagcgggcgtagagccaaatcctcgactatctacggtacgaaaaggaattgaaatttgccgaaatgaaaacattgacttcatgttagcagtcggcggaggaagcgttattgactgcacaaaagcaatcgctgccggagctgagtataaaggagacgtttgggatattattaacaaaaaagtaacggctacaaaagcactgccgtttggaacggtattaacattggcagcaacaggttctgaaatgaatcctgattctgttattacgaattgggaaacaaatgaaaaatacgtttggggaagtgccgttacgcaccctgtattttctatactagatcctgtgaacacaatgtctgttcctagagatcaaactatctacggcatggtagacatgatgagccacgtgttcgaacaatatttccataacgtgaaaaacacgcctttacaagatcgtatgtgctattccgtattacaaacagtaattgaaacagcgccgaaattaatagaagatctgcaaagctacgagcatcgcgaaacgattttatattccggaacaatcgcattaaacggaacacttcaaatgggctactttggcgattgggcttcacatacaattgaacacgcggtatcagcggtatatgacattcctcatgcaggcggtttagcaatcctattcccaaattggatgcgacacgttgtagatcaagatgtaactcgtatgaagcgtgtaatgacaagcatgttcgatattgaaactgcaggtaaaagcgacaaagaaatcgcattagaaggaatcgataaactaagcgctttttggtcaagccttggtgcaccttctcgcttagcagattacgatatcggagaagatcgactagacgaaattgctggaattgctgctcgtgaaatggagtacggaggtttcggtaactttaaaaaactaaataaagatgatattttagctattttaaaagcgtcactgtaaagtgaaaaacaaaaagaaggagacatctgtcttcttctttttgttttatcttataaatgactggaaattaagtagagcaggaagaatggttttttctcaaatttcagttaacaaccaaagaaaaacctttataattaagtacagaaagaaagttttagagaatttaagggagtggggagatgaaaaagtttgcgctagcttcatatgcgctttatttgctgggcggattagtcattacagccgtagggtccgtcttaccgcaattgttaacacattatcatgtgtcctatacagttggcgggcagcttgtattattaggttctttaggatttttgataggagttccgctatcttcttttctattaggacgcttcagagaaatgaatttacttacagtttctgcactaatgatagcgctatcacaaataggtatgcttttattgcctccatttgagtggattattgcattcaatttcttaaacggtattggtgtagccgcattggaagtagttgtagctactttaatgatggaagtatttatcggtagaagagctattgttatgagttatttagaagtgtcatttggtctaggtgcgctgttgatgccgttagtagctagcttattgatttcacagaacagctggaggttttcattttttataacgagtgtactagctttactaatggttgtggtctgtaaaatgatttcttttaaaaaagagactgttttaacttcagaaagtgaagcttcagacgccaactcagaacctgcgcctgtgcttgctaaaaatcaaagatggaaaatacttactctttttagtgtgatgatttttatgtatgccggagtagaaagcagtatgaataattttctttcgtctatttttatcgcgtatctagatgtaattccgtcacaggctactttgagcataagcgttttttgggtggccatgctaataggacgagtggctactggatggattattcgagttgttacatacgaacgttatctttttggcagcattggaggaacaattgtgagtttagtgctgtttattttgttaaaagaagcagtagcaggctatattttattagggtttttaggacttgcaatgtcaggtatctattcgataacgatggtatatgctaaccatacgtttactggatctgctcgtattgtaacaagtttaattactggtttttcagggcttggaggagctgttttccctgcacttattggctttactatggatgtaagcggaatcacctcagcactttggtacataacagcttttgcatgtttatatcttctggcgctttgcatcatttttttcgttcagcgtgatgccaaacaaaaagctaataatcatttgcagcctatgaaataaatgctacgtcaaaaaaagaagtgaattataagttcacttctttttctttttattttctctttcgatatagtaaacaaaaagggttcacataaattcaaacaagaaagtaaaaatggatatatctatgaaaaaggagcgcaatatgaaagaagtgaagtttaactcaaaggacatcttgagtcaaaaacaagaaaatgttcaaattataaaagcagaaaacgtgcagcctcagcaagcacgtgaaacgctggataaacatttgcttcttcttcaccgtaccgctaagcctgttgcgattcaagaaacagtagcagatagctttcatggaggagtagcttttaaaaatgatattaactttattcctgctggagctgacagcacttgcgaatggaaagaaccgctatcttttttgcgtgttgagttagatcctcaaaccgttaaagaaatagctgataaagaaaacttatcttctaggcttgatttaagctattaccttagaaatcaagattataaaatgcagcagctgcttttatggcttagcgaagaagtcgaacaggggaatcctcaaggaaaactgtacattgactcagttacaaatttaattatttatcagattttaaaacagcataacgatagtcagtcccatttccttggtaaggatccaggacttgagcatttaaaaatagcgatggaatacatgcaagaccactatgctgaatcaattacattagataagttaactcgtttgtctaatttaagttcctctcatttcattaacagctttaaacaaacgctaggcgtaacgccccatcaatacttgcttaagattcggatcgaaagagcaaaagaaaaattgcaaagatctagtttaccgcttagtgaaattgcttatggattaggctttacagatcaaagccatttctcaaggtattttaagaaaataaccggaatgtccccccttaagtgtaaacaaaattttgtacaaaaataaccgaattttgtacaagaaaacgacttgaatatcttctaaaataaacgtgtaaagcgatttaagaggagatgtttaagtgaaaatcatctccgtactataaagatcatacacagtataggagagatcataatgaaagtattagtaaatatatttcaccctaatttagcagaatctaacgttaataaagcgtggatgaagcaattagagaaggaagatgtcacagttaataatatctatgagcgctatccaaattgggaaattgatgtagaaaaagaacaagagcttttattaaagcatgaccgcatcgtttttcaatttcctttttactggtatagtacacctccgttaatgaagaaatggttggacgatgtgttaactttcggctgggcctacggtacgaatggtactcaactacacggaaaggaatttgtgttggcaatttcagtggggggaccgcaaaagtcatacagagcaggaggttataacaactatacgatcagtgagttaacaaaaccgctgcaacaaacggctaacttaacaggcatgaagtttcttactcactttgttcaatacaattcggttgttgctacggaaaaagaaatcagtgaaagtgctgaacatttagttcagcatataaaggatcccgcattaaaccccaacattgcattaaaaagaatactaaatgagatggctgaaaaagatgtaactttataaatggttaatatctattttaataaaaaatagaaaaagaaaggttgaatctatgtcgacctttcctttttttagaaaaattctcattaaatttttctaaaaatatctttataatnnnnnnnnnnnnnnnnnnnnnnnnnnnnnnnnnnnnnnnnnnnnnnnnnnnnnnnnnnnnnnnnnnnnnnnnnnnnnnnnnnnnnnnnnnnnnnnnnnnnaattttgctttagtattaatcctataaaccattcttttctttactttttactaatatatcaaatattatatatattcctaatgttatataaaattaaattgacaaatatatgaagtggtcattagaatttagtcatcgaacagtgaagagctgtttaaaagtaggggggaagtaaatgccgttacaaaataagcatctagcagttgtgttacaaaatacatatttaccgtttatttttgaagaagcagaagctctcggaattaaagtgacgtttttttataaccaagaagaagtagaacctaagcatcttaaaaacgtacaaaatttcatacccatcgatttatttcacaccccagacaaagctcttgagattattaaagcagagcatcacaaaaatccttttgacggcattatgacattatacgagcctgcattagaggttgtatctcagctgacagaagaattaaacttacccggtttatcgccatttgtgattagtaactgtcgcaacaaacagaagatgagagaggttttaaaagataatgatcttaacactccgtattttaaagaggttgaaaacacggaggaattaaagaatctttcactgccttatcctgtcgtagtaaaaccttctaacggattttccagtcaaggtgtatcacgagcgaataataaaaaggaactgattgacagcatagaaaaagtgagacgcgtaaatgaagaagacctaagtaaattcacaaaaaataaaacgggcatggtaattgaacaatttatagacggaccagagtttgctattgagacgttttctgtagaaggagaagtttatgtactttctataggttataaaggaaattccaaaggacctttctttgaagaaggtgtttatatagctccagctcagctagaagaaaacgtttggcaatctattgcacaagaagcagctagagcagcaaatgctttaggaattgataatggcccggctcatattgaattacgcctggacccagcaggaaaaccttatgtaattgaaataggagcgcgcattggaggatctgggatttctcattatattgtaaaagaaagtacaggtattaactatatggagctagttttttactatgtattagggttaaaacctcctgtattaaaaaatgaaagaaaacgaaagaaagtggtgggcaactacattatccctgtgcaaggtcatgggatttttaaagaaattcgaggcttagaagacgtgcgtagagatactgaagtaaaaagagttattcaatttataactaaagggacagacattttaccatatccgcacttttcagggtaccctggatttattttaaccactcatgaatcttattccgactgtgagcagtattacagctatttagataacaaagtaaaaatcgtttataaaaataaagtaaacgcatagggggtatcaaaggctatgatagttgcagagtcgtctagtaagaaaaataagcagcttcaaaaaattagcattatccataccttagggcctgaaggaacaaattgtgaaaaagcaggctatctgtggttcgaacgccaaagcatacaaggtcaggtctttttgcatcaaacgttggaagaagctttagttcatgtgaaagaaacagagagttctgctcttctaggctgcgcagtatatccttacttacatgatattgtgttcaaaaatttaactagtttagagctagtagatagctttattatgccaacgtataacatggtgcttgcctcaaaagaagaggtgataacaaccaataaccttttaattgcttcacatcctgcccctgttgatttagctcattccatcagtcccaatgttcagttagtaaatagtaatgctcaagcggcgattgattgtttagaaggaaaggtagacgcatgtattacaacgagtaaagccgctaacgagcaggggttaacagttgtaaaagattttggagaagtgccgatgtgttttacgctccatggaagaaaataggcttaactttaaaaaagaaataaggtgaaacagtgatttctaaattaacccgtattcatgtacatcttttgttctgtctattagcggtcatcgggggaacgacatgggcttttcaaaagactggattaaaggatagcttgcctctatggtcagcaggtatgaggtttttaattgctagtttaataattgccctctacctcttactcacaaaaaaaatggccgtttcaaaagaagtagtaatcatttcagtattaaacggaattttgtactttgctctaccgtttggttctgtttattgggcatccgtctatttgccaagcgggcttgtttccgttttagctgccagcatttcagtgtttgctcttttatttaatcgcttatttaaaggaacaccagctacaaaaggacaaaagctaggtgtagtcatgtgcttaattggtatgagcgttgtatttggaaatcagctgtttatacagggaaatgtgattcaaatagtagccatgatcgtcattttaatggctatgctaggttctgcttttataactgttcaagttcaatctcgcataaaatccttgcctattatgacctttaattctttttcgatgctaagtggaggcgtttgtttactgattgttagtctatttgtagaaaatggaaaccgcactttctctgggattagtcttatctcattattatacttggccattatagggtcggtcgtggggttttctattaatatttatttattaaaaaaatggcatatatcaaaagcaacggcgcatttatttatttcaccggttatcgccttatatgtaggatttgtctttttaggtgaaacattaaacaaacaggtctatataggtacagcgtttgtaatagcaggggttatatnnnnnnnnnnnnnnnnnnnnnnnnnnnnnnnnnnnnnnnnnnnnnnnnnnnnnnnnnnnnnnnnnnnnnnnnnnnnnnnnnnnnnnnnnnnnnnnnnnnnggtacagcgtttgtaatagcaggggttatatttattaacttgaaaaagcaaatagagaaaaacacaaataactctactcttaaatcatctaaaaatatttctgctaagtagctgttctaaaaaaggagggttttaatcatgttaacaaaaaatcatacccaaagtttagtggagttattaaacgataaaatagtacctgctctatatgagataagaaaatatcagggcccaaatggagaggtcaaaagaaattacgaaaaagctagagagctcttattaaaagtagttgcagaaactgaaacaatatataactctttaaacttacctgaagtgtggaatgcattaaaaaatgacgtatgtgagtggattgaaagaggactcgatcagtctccttactttgatcaaacgctaattgcctatagcccgcctgcaaacagggaagcgacgttctttttaggaccgattgtaacgcctaatggccctacaaaaagaggattttatttagaagcctttatcgctgttcgcgatgaacctgaaatcatgaaatccatcgaagcagaccttcctcatcctaaaaatggatgtgaatctttaaagctgttggctggtactcaaggatttatggaaggaaagtgtattgtatttttccctgagaatgtaaaaacaaaagaaaaggtaacaagtcaaaacttcgcgatatttttctttaataaatttcacagcatatacaatgaggatacattaaaaagagcgtcttctatctttcctgatttcaactttaaatctcatactatgaatagagaagacacttatcaggcaagggtaatctggggatatctgcatgattattaccatcactgcggaaataaaccttttgaccaacatatacaggcgaaaatgaatttttttgcaggcatactagaagaagttaaagtagattgccagacggtgctgactcttcataaaagaaaatatcctttttgggaagagataacggaatttgttctctttgaacgacttttaagataccctagtcagcataatgcacctcgaaactttgattctggaacaggtttttttctttttagctggctagttgcaaatgggcgttcaatatcccgaaaaggagaccatgcttatttagatttagacatatgcttaaaagaactggatcttttggtaaaagaaattgaagaacttgaaacgattcaaagggaccttgactataaagaagaagctgaacattatgttcgaaaatacttattacctagtgagaacgatgataaatttattatcccggacaattactttattaatcagcaaaataaaaagattgaagtcccatacttactattcgatgaccataatctttaaggagaaggtgcactagtgactgctttgcatttgagtaaaataggaaacaaaatgactaataaagtaggcgttcgcgctattatgcatgacatccaagaggtgctcaattccgatctcaatcaatatgtgaatttaagtgctggcaaccccgccatcctccctcaagtttatgaaatgtgggaagaagctttaagagatattgtgaacgacaaacaattaaaaaatttgattagccaatatggttctagctacggtacgcatgaattaattgattgcataagagaatacttctttacgaattatcgtattaaactggacagagaacaagtcttgatcacgtcgggaagtcaaaatctcttttttttagctttaaattcgttttgcggtacaagtaaagaaggaagagtaaaaaaagcattaatacctatgctgccagattacgctgggtatagcggagtcgcactcgaggaaggtgtaatagaaggaattcctcctatcctttcaaagcttgatcatcatacgtttcgttatgaatttaacaaacaagcatttaaagataaaatagctcaggacccagacatcggagctgttgtattatcaagacctaataatccaagcggcaacatcctttccgaagaagccgtacagcttatatcccaagtttgcaagaactatcacattccattgctaattgattcagcttacgcaccgccttttcctgctattaattttattaaaatggatccaatcatacatgataatatcattcactgtatgagtctttctaaagccggattgcctggagagagaataggaattgctataggaaaaagtgacttcataaaagtaatggaagcatttcaatcaaatatgttgattcactcctctaggctagggcaaagaatggtggttaacaccttaaaaagcgggaagttacctgaagtttcagctaactatataagaactcattataaacaaaaacatgactatttaaaaaaccttttaactacatgtatgccggatgatattccttggtatttgcacaaagcggaaggttcgttatttggctggctttggttagaaggtttgcctttcagtgatagcgatctatacaataaattaaaagcagaaaacttgattgtagtaccaggcggctcattctttcacggcagccaatcttcttctcacaaccgggagtgtattcgtataagtcttactgctacagatgaggagttaaagaaaggaatccacattctttcatcagtagttaagaaaatatacagttcaaataccatacttgaaacagggaaaatataatttcttaaatatttaaagatgacaagagccgccctgttcaccagaagcggcttttggtgtttagattaagtaacaggtgaatcagagagaacaaatagatatttttaatgatgtttctctgttcgttggttaatcttacaagggctatgttctcgctgttgtaaattaaagttttttagacactttgatgacggtttctttttcttttgagatacctttcacagtaccttctgttcgctgaaagccttcttcgcaaaaagtatggcttattttttccacaaaaggctgatccttctttaatgagttaataagctcttgtgaatcctgaggtttcacatctttataccaaataccgtctggataggaaatgacgacgcatttatcgtggcatctaccattacatcgagtgcgagtagtgtgtatgtatggatctaattcttgattggctatctcacttcgaatcgcctgtgtaacttcttcggctccaaaccgattgcagctgcttccattgcaaatgagaacgtgatgtttcgttgtatctaagttccatgttgccatattaattcctcctactaaaagtaatgattacgatttacagagcatgttccttctttttttagccaaaaaggctgcctttatttaattagaaatttaccagcttgattttttcactccaggaagctgtcccttgtgagctaactctctaaaagcaattcgagaaagtttaaacttacgcaaatatccgcgaggccttcccgttacctcacagcggttatgcaggcgagtaggcgaagaatctctcgggagtttttgtagttcatcataatttccttgttcctttaactgttttcttaactcagcgtatttttcaacaagtgcctgtcgcttcttttcctttgcgatctttgattttttagccaaataatcaatcctttcttaaaatcttttttataaatcgtaatcattattatttgtattattacatcataaaccactaaagaatgaaaggcaactcatatttaatcagtaaagttatatttttatatgctaaaaaaaatacgataatatacaatttcttttggaactggataattttttgcaatgaaagactcttatctttctgctagcatatgaaccacgtcaagaaatagcaaggaggctttttatttttatgataaagaaactagtaatcgctatagcaatgcttatcccaagttttggtgcaggttactcagcatttgctgcagcgcccgctcatgaacagcacgttcaagtaaataaaaatgataaagaattattagctcgtctcgtatcagccgaagccaaaggagagccttatgcaggcaaagtagccgtggcgacagttgtattaaatagagtcgacagcagcaaattcccagacactgtaaaaggtgttatttatcaaaaaggtcagtatagtccggtcagcaacggtcaaattaataaacctgcagacaaagattcaaaaaaagctgtagaagaagcaattaacttccaaggtcaaggaaaaggttcattattcttctttaatcctgataaaacgggagatcaatggctgcgccaaaaacaagaaacaattaaaataggaaatcatgtatttgcaaaataatgaaaaagctaatagctgcgcgctgctattagctttttcagttatgtacataaaataaacagtagaacaaccttcaaaattagaatttcgtggtgaaatataaaaagtcattcataattaaaaatatgaggtgataacgtgaaagagaatatgatgtttgcttggatagcttcatggttagctcttgctggtcagctcgtttttttatgggaatagcgctttttacaggggattggcgctacatgatgtggagttttatgataagtataattgtaggtatacctagtatcattggcacctataaacgaaatcagcagctaaaagcttacaaaaaataaggaatatcgtattgaaacgagttatgaaagacttagagaaatcctccaagtctttttttgtgtgggtataaaaagacatgaactgtactccgttcttctaaaaaaagtgctttttacatagtttatcaatacagaaaatttgataaacacgcggaggagtaaacatgcagaaacagcctaattttttgttgattatcgtggacgaggagcgatttccacccttatatgaaagtaaagaactaaaaaagtggagaaaaaagcatttaaaagcacataaatttttaaaacagcatggaatggagtttactcgtcattacgtcggttctacagcttgttcaccaagtcgagctacattgtttacaggacaatacccttccttgcatggagttacgcaaacgcaaggtatcgcaaagaagtcacaagatcctgatatgttttggctgcagcctaataccgtcccgacgatgggagagtattttaagaaggctgggtatcaaaccttttataaaggaaaatggcatatttctgatgagaacatcttaattccaggaacacataacgttttttctagctatcagatgcaaacaggaataccggatccagagaaagaatgcctctatcaacgggctaataagcttgaaaagtttggtttttcagggtggattggtccggaaccggaagggagaaatccgcgcaattctggttcatctgcggccattggagtgagcggacgagacgaaatatatgcagaggaaatcatagagcttattcaacgattagaacatcaagcgcctgcgcagccttggctcatggtagtttcatttgtgaacccgcatgacattgcgctgttcggagcgattaccaaacaccttcctatgtttcagttttctattgatgagacgattccaaacatcgatccgccacctaccattagagaacctttacaaacaaagcctagcgctcaaagcagctataaatatatctatccaaaagcgctgcagccaaccccaaattctagcttctaccggcgcttgtattatcagctgcaaaaaaatgttgataaacaaattttaaaagttcttcggaccatggaacaatcttcgttctatgaaaatacaattattatttttacgtctgatcacggtgatttgcttggagctcacgggggactacatcaaaaatggtacaacatgtatgaagaatctattcacgttccgcttctcattcataacaagcgtttgtttcctagttatcaacgtacagacacactgactagccaccttgacttgatcccgacaatgcttagtttagctaatatagatgcttccgctattcaaaagcaattacaaaaaagtcatacggaagtacatccatttgttgggcgagacctgtcaggtatacttcgaggagaaacgtgtgctgagcaagaggaaacagcgattttcttcatgacagatgatgacccgacaaaaggacttcaccaaacaaattttttaggagaaagctacccgtcagttgttcagcctaatcatattcaagcggtcattgtcgagttttcgtcagcggcaggaaaggaaatttggaaatacgctcgctatcatgataatctgcaattttggtcagcagatgacgaaaaagatgaatttattcacggagagcaatatgaaggttaccctgtgagttttgctacccttaaaacaaatcgtgttcctgatcaaattgaaatgtacaatttgaccaaggatccgttagaaacagtaaatctggctcacctgtatttttcgacaaatgaaacaaggaaaattcagcggcagcttgacgttattcttaaagaacaagtcaggaaaaaacggatttttccccaaagtgaaagcatgcatgatgagcttccgtctaaagatagataaaaaatagtttctacggattgaagtcaaacatttgcgtgagcataaaaaggtgtatttaatattttaatatataaataaaaaaacctgatgatgcttgtgatatgttacttgttctggtttgggatagtattggtttcacttcgttaattccgcttagataaaccaaataaggacttatagcatctttctttttcgcctttattgctataaaaataagaatgaaatgtagtcgttaatagtataataaaaaactttttaagtccgtatattcttaagtaacttttcaaaaattcaagcataaagtaattctataccattaaaaaataaaaaattacttcttgacttttgttaaatttatacactataatcgcttttaacaactaataaacagtatttggcaatgaaaaggacatgaattagatgctgttttcttcgcagagaatagggtcactggctgagagcccttaagaaatcatctgatttaccaccttagagctattgcagggaacgtgcataactgaaactgcaatcggtaaaaccgttatcttttttgagcgtaaaatacgtataggtattttacggaattagggtggtaccacggccgcattcgtcccttcactagggatgagtgcggctttttatgtagaaaaaatgaatatacaagcaatgaaaaggacatgaatcatttttggattttctttacagagaatagggtcactggctgagagcccttagaaaacaaaatgaatttaccaccttggagctgcggcggggaatgtgtatacactgaaaccgcaaccggtaaaaccgttatctttttaagcgtaaaatacgtatgagtattttacggaattagggtggtaccacggccgcattcgtccctttactagggatgagtgcggtttttttgttgaataaaaatatattggaggaatgaacatgtcaaaacaagtggaagcagaaaagcgaaatcatcaaaagttaggtcaagaactggagctgtttatgtcgatggaagaagctcctggtatgccatttttcttacctaacggaatgattattcgaaatgagttagaaaattattggaaacaaaagcattataaagcaggctatcaagaaataaaaacacccatcatgatgaaacaggaactctgggaacaatcagggcactgggagcattatcatgagaatatgtatttttcaaatgttgacaaacaaaactatgcgattaaaccgatgaattgtccgggagccattttattgtttaacagcaagcgaagaagctaccgagaacttccgattcgatacgcagagcttggattagttcatcgtcacgagctttctgggtctttaaacggattgctaagagtccgttcatttacacaggacgacgctcatttattcgtagaactcagtcagattgaagctgagattagccgcattctagcgtttatccatgacttttactcacattttggcttcgattacaaagtagagctatccacacgacctgaaaaattcatgggagatattgaaacatggaaccaagcagaaaagtcgcttcaatctgtgttaagtgaaaaaggcttagactatcaggtgaatgaaggagatggagctttttatgggccgaaaattgattttcatattttagattccttaggtcgaagctggcagtgcggaacagttcagcttgatttcttaatgccggagaagtttgactgtatgtatattggagaagacaataaacctcatcgtcccgtaatgattcaccgcgctatatacggttccgttgagcgattcatggccatcttgattgaacattacgaaggccaatttcctctttggttagctcctgttcaactcaaactattgcctattgcaccgccacacgtggaatatgcatataaagtgaaacacgagctggagttaaaagggtatcgtgttgaagtagacgatcgcattgaaaaaatagggctgaaaattcgagaagcagaaatgctgaaagttccttatatggctgtgataggagataaagaagtggaaaatgaatcgcttgctatgcgaaagcacgggaagaaaaatataggaacagtaagtgtggaagaggcagctgtacacttgaataaagaaaagaattcaaacagagtttgttgaagctatttaccttactaaatagaaaaatctgattttttaagtcggatagtgattcccttcattttgtctcacaccaaaatgaagggaatattgaactagaagggtataagataatatatatcagcagtataacttttgccttagacaaacgccggtattttataaaaaaatttatcttattccattcgaatcgtttgtacgggatgaagctgaagcctcacctgatggtttgttcatgttttgctgatctcgcttctttttagaaggagagtaaaaaagaaatttaaacataaagtatactcctaatgctagtaaaatacagccaataagtaagttaatcatctttctccgcccttcatacacttcagttttcatcattataacacccggtaagataaaacattcatcgttctgtaaataatctctatgtcaggaatttatatctgaagatagttagtaaaaaagttatctaaaaacatataaagtaattttttagaatattatttttattcaaatttattatacataagcacaatgataacctctttatttagtttataaatccaaaatagagcgatactaagaaatcgcttacaaaaactcttgaaatatatataatgatattagtatactaatagacaagttagtaattatttctatataattacttctgtatctgaagtgaaaacgcgcaggcaaatgggaaaaggcgttattttcaagtttttaatggatgagtggcaacagagaggagagagtgcaatgggaaaactatttaaaaagaagtcaatcgagcaattattagaacaaagtcaaaacaaatctctagtcaaaacattaggagcattcgatttgactcttcttggtattggagccgtaatcggaacgggggttttagtattaacaggcttagtagctgctaacgatgctggaccagccgttattttttcttttatattggcttctattgtatgcggttttgcagcgctgtgctatgcggaatttgcttcaactatacctgtatctgggagcgtttacacctatacatatgcaaccatcggcgaagtggtagcgcacttaatgggatggacgttgctttctgtctatttgttaacaatgtcagcagtagcaaacggatggtcttcttattttaacaactttttagaaggctttggtttttcgctgccaaaagaattgattacgatccctgcaaatggaggtctagtgaaccttcctgctatttgtattacgcttcttattacatggctgctttcaagaggaacaaaagaaagtaaaaaagtgaataactttatggtgcttgttaaattgtttattatccttctttttattattgtaggagctttttatgtaaaaccgtctaattggacaccttttatgccttatggaattgaaggtgttgtgacagggggcgcggccgtattttttgctttcttaggttttgatgccttatctacatcagcagaagaagtaaagaatccgcagcgcaatttgcccattggaattattagttcacttgtgatctgcacgattatttatgtagcagtatgccttgttatgactggagttgtttcgtacaaggaattgaatgttccagaagcaatggcctatgttctccattcagtaggacaaaatgcagtggcaggagttattgctgcaggagccgtcattggaatcatggctgttattttcgcctacatttatgcagcaacacgcattttattctcaatgagccgcgacggcttgctgccaaaagcatttgctaaaacaaatgagaaaacgggagttccgactctttctacttggctagtagggattatcggagcgttaatttcaggatttattgatctaaaagaacttgcgaatttagcaaatatcggagctcttttaactttcggcatggtgggcgtcagcattatcatcttacgtaaaacgcacccaactttaaaacgtggatttacaatgccgtttgtacctgttttaccaattttatctgtattatcttgtttatttttaatgattaatcttcctaaaacaacatggctgtattttagcatatggattgtgcttggtatagttgtatatgtcggttattctcgtaaacacagtcgattaacaaataaagaaatgaaaaaagtaagttaaaagtaaaaaaagagcctttcagcaaagaaaggctcttttttacttattgttcggttgttagacagttagaacgattgttcactatgttttttgcgtgtctccacaataaaaagacaagtgctgataataaaagccgttcctacaaaaatggcgccaacccaaggaagtgaagtaagtcccatatggttaataattacgcctccgaaaaaggcgccaaaagcatttcctaagttagcaaacgagtgattcgaagtagaagctaaagcaggtgcttcctgtgctaagttcataattttcacttgaataccaggcattacagcaaatgctgctgctccccagaaaaacagcgtgataatagctgctgttgggcttttgacagtaaacgtaaaaatagtcagcacaatacaaagaaaagcaaatatacctacaaccgaaggcattaacttccagtctgctagcttgcctccaacaacgtttccgagcgtaacgccgcatccatataatacaagtatccacgtaacgctatgttcacttactcctgtaacgtcttcaagaagcggtgtaatgtacgtaaatacagtaaataaactgccgcatcctattgcgcttaaaagaagcatcacaagaagttttggttgagtaaaagcagcaaactgctgttttagacccgttaatttgtcttgaccaagctttgggataaacagaataataccaataaatgcaataatccccatgatcgtaatagctccaaacgaagctctccagcctaagtgttgcccaatgaatgttcccacaggaacgccgatgatatttgcaatggttaaacctgccatcatcgttgcgacagcacttgcacgtttatgaggttgtacgagccgtgaagcaataacagcgcctactccaaagaaagtaccgtgacataatgccgtaactaaacgagctcccattaaaattccatagctgggtgcaacaatagcaattgcatttccgagaataaacaaaagcataagtaaacaaagcagaagcttttgaggaagtcgatgagtaaaaatagttaaaattggcgcgccgattgctactcctaaagcatagcttgtaattagctgtccagcagtcgaaatgctaacatgaaggtcttccgcaacgttaggcagtatccccataataacaaattccgtcattccaatggcaaaagctccaagagtcaatgagatgagagcaattggaaaggaatctttcttactgacctgctcattagcatgcattgtattcatgtgtgatcaccctttctgtgtataaaatttatatctccttgaaaagaagtcaattattaataatacttaagtgatggagctttgacaaccaaaaaagctgatgtaagcggtatatttcgggatttgatgtaagcggtatctttcgggatttctatttatctttatcatatatgaagacagtcagacataaatttattgacagaataaagtttagtcctataaactatttttaaagttgaatagtttatacctataaactaaatgagtaaaggagggaaagaagtgacgaaaagcaagttatatcaagctgtagaactttttgaagaagtgctgtttgtaggaacagaagtaattcacagagagcttagccataacctcttcgaacatgtctctaggcagcagtttgatttgttaaatagtttaatgattaaaggtccatcttcaccaggcagtcttgctgtcttgcaaggtgttcataaaagtgccatttcgaatcgaattaaaaaactgctcgaaaaagggcttgtggagtgggacactaacgaactagagagcgataaacgttctaagcttattaagattacggctgaaggagaaaaggtaataaatgacggaaatgccgcgtgttttagtatcattgagaatttgtttgatgatgtagaagaagaaaaaatagatacatttattgaaattcttacaatggcaaaagaaaagttaactataaaaggggaaagcaaaaaatgaaatttattgtgaaatttaagtgggtgattgcggcctttattttagctttaacggttatattgatgctaacgtcaccaaatttaacaaagctcgcaagtgaaaaaggacagtctcagcttcccgacgatgccgtttcatctagagccagccaaattctaaaaaatgctggagaagatagtaataccattagcatggttatcaagttagataacgcattagataaagatagtgagaaacaaatacagaaaatcattgataagacagagaaaattaaaggtgtaaaagatgtcacaacgcctttaacagatgatcaagatgttcgtaatcaattaatgtctaaagacaaaaaaaccgttttagttccggttactgtcagtggatcggatgaaaaagttgaaaaaatagcgaatcagatttatgatagcgtgccaaaagacactacggcatatgtaacaggtgcatctcttattaatcaggattttgcacacagttcagaagaagggttaaagaaaaccgagtttattactatctttttgattttaggtttgcttttactcgttttccgttcagtcgtgacaccgtttattcctattttaattgtgggaatcacatacttaatcagtcaatcgttactagggattttagttaaaaatgtcgattttccaatctcaacgttcacgcaaacgttcttagtagctattttgtttggaattggtacggattactgcattcttttacttaaccgtttccgtgaagagttggcaaacggacatgataaagcagaggccacgatcacggcttatcgtacagcaggaagaacgctatttatcagcggaattgccgtatttattgggtttgcagccattggatttgccaagtttgccattttccagtcggctgtcggggtagcagtgggcgtaggtgtactgctagtcattttatttactctgcttccactttttatggttacgcttggagaaaaattattttggccgtctaaaaaagtggcttctcatagcgataataagctgtggggctttttaggaaaaaaggcggtggcgcgaccgttcgtgtttttagtcattacagcgattattaccgtgccttttattgtaacgtacgactcaaaagtatcgtttgattctactgctgaaataagcagtgagtataaatctataaaaggactaaatgctatcagtgatgcactgggagaaggaaaagcgtttcctgtcaatgttattattaaaggagataaagagttaacaaaggcggatgttattccttatttaggaaatataagcaaagcaattgaaaaagtggatcacgtggattctgttatgactatcacacagcctaccggagaaaagattgatgatttatatgttaattcacagctaggctctgtatcagacggaatcaaagatgctgttaaaggaatcggagatgtacaaaaaggattaagtgatgttgaaaaagggctaaatcaaatagctgaccaaacgggttctgcttctaaagagaaatctagcgggtcgcttgcacctgctgcagatggattagctcaaattaatcaacagctgcagctcatcagcactcagctctctacaacaggaaatgtgcagcaagcggttccgcagcttgttgcaatcagtaaacagcttactaccattcaaaccggtctccaacaagcaaataagaatctttcagctcagcaaggtcaagttggaacgttatcagacagtatcaaccagttagcaaaaggcgttaacagtgcgaatgacggactgacgaagatctcagatggcttaacaaaagcaacagatatgcttgataacatgagtgacagctcaacagttagagatacgggtatttaccttccagcagaagtgatgaaagataaagggtttaaacaatccatcgataactattcttttgcagatggaaaaggagttaagctcagtgtagtgctcgatcaaaatccatattctgaagaagccatttcaaccgtaaaaaatattgaaaaagcggtggcaagcgaagtcgttgatacgccgtttgaggatacagaaattgtgtacggaggggtatcgagctcaaatgcggatttaaaagatttatctacaacggatctttcacgcacaatggttattatgatgattggattgtttattgtgctgaccattttattccgttcaatgatcatgcctgtatacatgattgcttcactgctgcttacgtattatacagcaatggggatctcagagcttctattcgtggatataatggggaatgacggaatcagctgggctgtgccattctttagttttgttattttagttgcccttggaattgactattctattttcttgttagaccgttttaacgaagaagtaaaaagcggcgtagcagaagggatggttacgtccatgagtaagatgggatcggttattattactgctgctattatcttagctggaacgtttggggctatgatgccatcgggtgtattaacacttgttcatgtagcaacggttgttattattggtcttttactttatggccttgtcattcttccgcttcttatgccagcgattgtcgtaacgcttggagaaggaaattggtggccgtttcttccgaaaaaagaaaaacacaaagtagaagaataatttgtatatgatagctgtatcaaaaattagatatctgttaggaaatagtgatacgcctgtatagcattaaacattatatagggtgaaaatgaaggatagatgagcgtcataagactgctctatctatcctttttgtatgattggaaaacgtgagtatagtttaaaagcacaatcaagcaggtgctgttataaatacacctagtcgaataaaagacctaccatcaggaaaacctatagtcaaaaacatgagggaggtttttttatgaaatttgtaaatttcttagctaatcagcgagacaaacgacgggaacaaatgcgcgaagcaggaacatgtccagattgcttaggtaaacgattccaccatattggactttattttgtgcatgtttatgagtgtccaagctgtcaaggcaaagaagatatgtaataaaatcttcagaaataaggcaaaggcagtctttatgcagattatgatgtgaaaccttcttattttagagaaggtttttatttttttgaaggtgaacggttgcttgtatgttttgtgttagcaacctttacatatttattttctgtctaactagattcgattagtatagttattaagttactttaatgtctcaagttaacaatttaaataaaaaggaggaaagaattaaggattaaggaaaaagagacgcgtaacttgcaatcatgtatctcaaactttaaatataaggagctgaggtgagatgacaatgttacatttagataaagtatataaaatatatgataaaaaaaatatcgccgtaaatgattttaaccttcagattggagagaaagaatttgttgtatttgttggaccttcaggctgtggtaaatctactacgctgcgaatggttgcaggtctagaaacgatttcaaaaggtgatttttacattgatggagatcatatgaacgaagtagctccaaaagatcgtgacattgctatggtctttcaaaattatgctctttaccctcatatgactgttcgagaaaatatggcatttggtttgaagttaaaaaaaataaagaaagacgaaattgatagacgggtaaatgaagcagccaaaacattaggtctagaaacatatttagatagaaagccaaaagctttatccggagggcagcgtcagcgagttgctttaggtcgtgctattgttcgggaagcaaaagttttcttaatggatgaaccattatctaatttggatgcgaagctgcgagtacagatgcgtgctgagattattaaactgcatcaaaggctgcaaacaacaacaatctatgtgacgcatgatcaagtggaagctatgacaatggctactcgcctagttgttatgaaagacgggattattcaacagattggaactcctcaagatatttatagacatcctaggaatgtatttgtaggcagttttattggatcgcccgcaatgaatttttttcgggggtatctccaaggcacttattttataatgggcgaaactaaaatacagcttcctgattttctaatacacgctttacattctcaaggtcataataagaaagaggtcataatgggtgcgcgtcctgaacacattgtatatcataaagaggatagtaagagagagttgaacaatgagttttgcttcactacgacactagatatgatagaggtactaggtgctgaaacaattttatatgctagtttagaaaagcaaacgtttgtggcccgagtgcctcttttatgtgagtttgaagcaggggacaaaggggatttttcgttgaatttaacctacgtgcatttttttgatggagaaacagaagagcgcatttctacaaatgtagataaaaaagttaaatattctgataaatgtattgactagttaacgtttgcagtttaatataacaatatataacattacataatgttgtatatcatattttatttgaggagtggggaaaatgagcagaacagcagtgaatgtaaaaagtgatgtgcaagccgtattaaacgaattaaaaagcaagcaaattcgtaatgtgtttttcgtcgcatgtggaggatcttctgcgatcatgtatccagctaagtatgtactagatcgagaagctcaacatattacatccgatttgtatagctcgaacgaatttatccaccgcaatccgcagcagctaggaaaagactccttagttattttatgttctatgtcaggaacaactcctgagactacagaagcagctaagttcgctaaaagcaaaggcgcttatgctgtagccttaacaaatgaacctacttcacctttagcacacagcgcagatatttttattaagtatgagtggggcaatgacatcgatgcttttgaaacaaacttaggcgttttatatcagcttgtatttggtctcttatacgtagcagaaaaaaatgataaatttgcaaagttagttactagcttagaaaatctacagtctgtttatgaaaaagctttagaatacgaagcgagcaacgcaagaaaatttgctgaatcccataagtctgaaccggttatttatacaatggccagcggctcgaactatggagcagcctattcattcagcatctgtatcttgatggaaatgcagtggattcattctcacgctattcacgctggagagtatttccacggtccattcgaaattattgatgaaaacgtaccgtttatcatcctagctggactagatgaaacgagacctttagaagaacgcgccttatcattctctaaacgatatggaaagaaattaactgttctagatgcaaaagtatatgacttcgaaggaattgataaagatgtgcaagggtatatcgctcctcttgtattaaatcgtgtactgcgtcagtatgccgaagaattagccgaagcacgcaatcatcctttaagtaaaagacgctacatgtggaaagtagaatattaataacaatccctaataaagatagaaatctgtatattttccttacgagttatactataatgttataaaacattatagtataacttatatatgaaagcacttacaataagggggtttctatatgaaaaagacaaatttaatcttagcctcacttttaagttgttctttaatgctcggggggtgtgcgggaaaacaaacgtcttcagactcagacacaggaaagacaacgttaacattctttcacagatggccaaaagaacctgaaaaaagttactttgaagaagttgtaaaagaatttgaaaaacagcaccctgatattgatattaaaacagaagcggtgttaaacgattcgtataaagacaaaattaaagttatgacaggtactaatacccctcctgatgtgtacttttcttggagcgatgagtttgctagacaatttgtcagaggaaacaaagccttagatttaacctcttattataagaaggattcagcgtggtcttccaagcttgttcagtctcaaattaaaccatataccgttaataagaaaatttacggtgttcctgtcacaatggacgggaaaatgtttttttacaacaaagatatcttcgataaattaggattaaaagcgcctacaaactggaacgagctactaaatgttttaagcgtgttaaaaaagaagcattatacagctttagaatttggaagccaggatacgtggaccatttctcactacgtaggaaccttaaatcagcgcatggtaaagcctgacgttctttcaaaagactataattcaaaaactgggacattcacggataaaggctatgtaaaagctctagaaaaattagaagaattagttccttactttaataaaaatacaaattcgattgatcatgaatatgcaagacaacaattttcaaatggaaaagcagctatgttttatgctgaaaccgctgaaattaagcttttcggtccaacgaaatttaagattggcatgtttaattttcctaaattagaggatggaaaaggaaatgctactaatttaactggatcacctgaagggtttatgatttcttctaaaacaaagcatccaaaagaagcgatggaatttcttgaatttttaacatcaaaacaaatgggtgaaaagctagtaaaagaagtagggaaatacagtgcagtaaatgatacagctaacagcagtaattcaacaccggagcaattagaagcagtagataatattttaaaagccaaagagatggctccatggtttgatatggcaatcgatgctcgaattgcagatgcttatttaacaggggctcagcttatgctaaatggtgataaaacacctaaagaagtaatgaaagatgtgcaaaaagctgcagcgagtgttcgtgctgaatctaaaaagtaaggaagtgaaaaagcgatgttaaaacgcaataagctaaccccttatttatatcttcttcctgcttttgcttttttactacttgtgtacatccctatttttcagaatatttgggatagtctttatgagtggagcacattttcaccagacaaagtttttgtaggaatagataattatgtgcacttatttaaagaccctgtcttttatcaggcactcaaaaataatattctttatgcggtcatttcaattatttttcaagtaggaggcggtctaattgtggctgccgttttagaagataaacttattcgaaggttttctcctttttttcgaacggtttattttttaccagtagtggtttcgatgaccgttattgccttattgtttacttttttttacaatcctgaagtggggcttttaaatcaaatgctcaaaatgatcggattagactcattggcaaaaccttggctaggagatagtaatacggctatttatgcagttattgctgtatctcagtggcagtctatcggctatattgccatgctgtatattgtagcgatacaaaaaatctcacctgaattgtatgaagcagctgaaatagacggcgctaataaatttaaaatgttctttcatattactgtaccgcaaacaaaagaaatgacatttgtggctgttattttaacgctcactggtgcttttacagtatttaatgaaccttatattttaactggaggcggaccgggtacatcatctgaagtgctaagtacgtatttatacaaaacagccttttcgaaagatatgatgggctatgcttcctcaattgctactgtcattttaattattacgctgttgatttctcttattcaaatgaaagcatttaaaacaggaaaggaagacgcttgatgcagatgcctaaaacaaatgtcaccttacctaatgttgtcaatacagccactaaagaaagaaaaaagaagaggtacacaggtgtaacgatagtatatgtcggattgattgtctattttatcgtcattgcgtatcctttgctttggatgattataagttcttttaaaagcacagaggaaatctttactcacagctggtctatgccgcatacttggctaattgaaaattatgtgacagcgtggaaaagtggaatatcttcttactttttaaacagtgtgatcgtcacgggcgcgtcttgttttttgacggtcctggtcagtgcgttaggagcttatggactatcacgctttgagtttcaaggaaaagcttttgtcctcattatatgtctcggaggacttatgctttctcctcaggtaagtttaatccctttgtatagcattattcaaaaacttggaatctataatacacacttggcactgattctcccttatgttgcttatcgaattcctttaaccattttgttaattcgagcttattttctttcgattccaaaagaactggaggaagcagctcggttagatggatgtacaagcttagggattttatttcgaatttttattccaatgagcacgcccattttattaacaacgacaattttgacagcttactacacatggaatgaatttatgtttgccattatctttatcgacgatgacagtttacgtacaatcccagcaggattaatgcaatttagagacgctttgcaaacagattggggggtattactagctggactgaccatttcagcagcaccgattgttatgttgtttttatttatgcaaaaatattttatccgtggcattgctaacggaagtgttaaataataggaggacaagcagatgaaactaattggagtaggggataatgtagtagattactataaagatcaaggaaagatctatccaggcggcaacgcgctaaatgtggccgtattttataatagattgagcaatcatcagtcttcctatatgggaatcgtggggaatgacgaatcggcagagcatgtagtaaatactctgcagcaagaaaagatggatattagcagagtaagaagagctgtaggagagaatggaatggcgattgtaacacttgatgaacaaggtgatcgagtttttgtaggatcaaataaagggggcgttcaatctaggttaaaactaatgctgaatgaatcggatttaacctatattcgccagcacgatcttcttcatacgagcgtttttagtcatttagaatctgaccttccgttgctacataaaatcattgatatttcctttgatttttctacaagatacgatgaggaatatttacagcaagtatgtccatatatcagctatgcatttttctcaggaagcagcctgccagaagaagagtgtatgaatttaataaagcgagtacacctgttaggaaccagtgtcgtatgcgtgacaagaggagaagagggagctttattatcagtcgaaaatcagttatttaaacagcctataattcctacaaatgtagtggatacgcttggggctggagattcttttatagctggttttctttcttcttatctaccagaaaaaaacatagccaaagccctccataatggatcattggtggcatcacaaacttgtcagaattacggagcatttggatatggaaaagaatatcatacagactgtgcgatagttttaaaatgaataaaatagcgcctttgcttttaaagcaaggcgctattttattaagaattagaactgtctatagtgaacgtaacgcgattcgcagggtagtgtagaaaagatgaatgaatcggtcttttttgtgcatcatacgccactttttccactttaaacagcggctctccgacttcacattctaaatgttttgcttcatccacgtttgcaaataccatgttcaataattttttattatgaaccggagtaatattgtacttattttttatagtatcgtacattgaaactgaattatggacgtgctgatctaagtgtggtaacaattctaaggagtagtgagaaatttctaaggtaagaggctggtcgtcataatacaggatgcgctgcagttcaaggacttcactttctggagggattgataacatctttgccacatgagcttttacaggttttataccaaaagacaaaattttagtctgcggtactttccctaattccgacatatactctgtatgcccattaacggcaaacagctctctcttagcttttggatattgaacaaaggttccttttccttgctgacgtatcagaaggccttcttctactaaatctaatacggcttttcttaccgtaatccgacttactccgtatatatcgcacaaatccgtttcaattggaagtttttcacccggagtataaactcctttattaatatcttctgtaatagcctgttttaactgcatatataaaggcgtagagctatgagtatttagcttcatctttttcctcctctttcctaaatacttgcttttgaatataattatattataacgtaatgtgatgttatattacaatttgcttttcttcctttttatcatgtatgtttgatacaaaagaaagaaaagttggcgaactcaaagttctatagcattcacctttcttttctattaattgaaaacatgggtaatggttagacaagcaatagaaaatatgcaacaatttttattaccagcttcttcaacataagataaaatagaaggtaaaaactttaataaaaggagattccgccatgggtgaaaaaaagaatattgatataggtggtcttagttttgcttgggatttagaaaaaggccaatttagctttgagggagaagatgcgatccttttttggattacttctgcgatgaaaacattgtttgacacaatcgaagaaatatctggagaagaggcagcttctgtagtactggaaaccactggtttccgacagggattagtagtaggagagtactttcaaaatatgaaaggcgtaacggtttttgaagcggctgagttaattaccaatacatacgcttcggctggatggggaaaaactactatcaaatatttaaatcctgaaagtaaaactctatctgctgaattaaaagacagttgggaacataaaattaacgttgcgcaaaagaaaacaaagggaggaaattttcttccggcccattatgcagggatttttacaggactatttggcacaaatatttggtacaaggtgattcaacatcaaatagaaggacatgaatgcaccacagtagaatacttcccttctaacattgatatcactcaaaatattcatcaattagcgagaagaaaagaagcgcagaaaatagaacatttgcaaaacattgtagcagaaaaaacagcagagttaaaagatcttattaaaaagctttcttctcctattattccggttttggaaggtatagtcgtcgttcctttgattggcaaatacgacgaggatcgaacggaagatttgattgtcaatacattaaataacctcccaaaacaccaggctaattatcttgtgctggatttaaccggattggataaagaacttactgaatatacggcaagtcttattgaaaaattaggtgcagcagcgtccctgattggtacgaaaacaattttagtagggatttctgccgatttaggcttagttatatcaaagacccatattgatttatcgaaatatgattgttttcaaacattgcaacacggcattcattatgcattggcacaaagcggacgaagcatcgtttaaaatatatatttgaaatataacaaaatgcactcattcagcatcataacaaatctctttattaaagaacggaaatgaattgaaggatttcattttttaaaagatgaattgacatgaaaccaaaaggtgttatattgtttttatataaaactttttggtgttatttttttaaaaaggagaatgaagataacgatgaatgataaaagtgtagtagaagatgtaaaacagacgataatatttaacgcgccgattcaaaaagtttgggataaagtagcaagcgcagaagggctccaacaatggttcatgcctaatgattttcagcctcaggtaggatatgaatttcatttgcaatcgccttttggcccatctccgtgtaaagtattagaaatagatgcaccaaactatctttctttctcttgggatacggatggatgggtcgtttcgtttaccttaaaagaaatgggtaatcaaactgaatttacgcttattcatagcgggtggaaagaagctgaaacacttcttgaaaaagcaaacgaaaagagttcagtggtacgagatagaatgagctacgggtggattagtctcgtaaatgaaaaacttcgaaaggttgttgaaaactaaatgacttcatcagctgccaagcatgatatctttcaagccattgctgatcctactcgaagaaaagtacttgagctgctttctgaaaaagaattgcctatatcagaaataacgtctcatttttcaataagccgtaccgctattgtcaagcatcttcatatactttcagaagcagacttagtccatggacagaaaaaaggcagagaaaaagtgtattgtcttcaaccagagcctttaaaagaagtacaagattggctttcttactacgagcaattttggacgaacaaattatctattcttcagcatattgttgaaagagatgaagaaagaaatcaatagaaaaagcataaaaacgttttttatagggaatatagcaaagccagtcgttaaaaagactggctgttttacataaaagctggttttattctagaaggacaaataaaagaacgatgcagaacaacataggacatttcttgaaataaaaagatagacctttagaagaaaaaaagggggagacagagcaatgaacaagcttttattttatgggacgagcgatgctcaaggagtgcctcgattattatgtgactgtaaagtatgtacacaaaaagatcaattaaatcagcgcacaaggcctagtgcacagtttacaatggacggtaacgtgtttttgattgacgtatcacccgattttaaacatcaatttcacttatacaataacaaaaaaatcccttctaccgtttttattactcatcctcacaatgaccatgtggctggtttaggagatttagcagacttatgctattggaataatgtaaatacagaagtcgtaggagcgcctgaagtcatcagcgagttaaccgaaagatttccttatctcgcaaaaagaaaagggcttacctttaaaggaaggttaaaatgggatagtggagaaacaaccattacgtttcataaagtaaatcacggatttaacggtcattcctacggcattgtggttcatcaaaaacaaggcgaacgctgggcgtatgtatccgattcttttaatgtgacaaaagaacagtggcagcccttttaccacttagatttactgatatttggtacatctttctggaaagaatatcttcaaaaagaaaaaagatccgtatatgacgtgacagaggcaatggagatcaaagcgaagctacaggccaaaaacatggtatttactcatttatcacatgatattgatatccaaaagcacgccgagatgctttcagatgaaaacgtaagctttgcctatgacggacgcgagattttattaccctaaagcaatacataaaggcataaaaggtttcatttaaagaagcagcgtagctaaagtgctgcttctttaagtttgtaaattagatatgttcgataaagttgctcacaactttgttaaatcgatcgctttcttccagaaaagggcagtggcagctgttctcaaaaacttcaagtacagaacctgaaaccagcttttgaatatgtcttccagctgctaccggaatgagctttttttcttttccaaagcacagtaaggtagggattgcaataaacgggagaaaatctcgatagtccacaatggattgatcaaacaaaatagcactggctatcgactcaggcattttcgttccttctttcataatccaatgtttatcttcttcagttaattcatccttaaacataagcggaataaaattttctaatgtacttgttcgatcaagctgaataccctgcatgagcgaaataagagcaggtaaatcaaatgcaccgatcggaaagtcgggccatttaaaatctgaagccatttcatctacaataatatttccttttacattttcttgaccaaattgtttcaaatattcccatacaacaaaagcacccatcgaccagcctactaatatgacgtcttttaattgatgagtggttataaactcatgcacatcacgagcataagtggaaattgtatggccgtatggagtatgacttgaatttccatgtcctcttaaatccaaaagaatagtttgatactgttttgaaaaaaaagaaagctggttatggaaaaaacgactgctcatccaaactccgtgaatgaaaataataggtgttccttccccttgttgttcatagtacaaagttgcaccgtcttttaatgtataaaaaggcattatttttgcccccaatctcaaagatttatatctcatcatgtatgcgcgggcacattcatgtagaacgtatcgcgtcaataaaatttttattgaagaacaaatcctagaagtggacgctttgatatgttatactattacaggcttaaatactgtatgtttttgaaacaatcattcactgtaatactttttagatagaagcatcctcataaaaaggatgttgtttttgtcgtaatgtacctttaagtaatgaattgttaccatcaattcggttcacaataaccgacctacatgcattatatcttgcaaatataaacagataggtggaagaagcaacatgactgaaagaaaaccatatcaagtactactatattatttgtacactccaattgaaaatcctgaagagttcacagctgagcacttggcattttgtaaagagcttgaattaaaaggacgcattttaattgcggctgaagggatcaatggaacggtatcagggacagttgaacaaacagataaatacatggaaacgatgaaaaatgatcctcgttttgaaggtattgtatttaaaatagacgaagcagatgaacatgcgttcaaaaaaatgcacgtgcgtcaccgcaaagaattagtaactcttcgattagaagatgatgtgaatcctcttcgcgtaacgggtaattacttaagcccaaaagaattttatcaagcgatgcaagatgagaatacggtcgtaattgatgcacgaaacgattatgaatacgatttaggtcatttccgaggagctgttcgtccggatattcgaaacttccgtgagcttcctgaatggattcgcgacaacaaagatcagtttgaagataaaaaaatcttaacttactgcacaggcggtattcgctgtgaaaaattctctggatggcttcttgaagaaggtttcgaagatgtaagccagcttcacggaggtattgtaacatacggaaaagatcctgaagtacaaggtgaactatgggacggtcagtgctatgtatttgatgagcgcatcagcgtaccagttaaccaaaaagagcatgtgattgtcggaaaagaccactttaccggcgagccttgtgaacgttatgttaactgtgcaaatccagaatgcaataagaaaatcttagcttctgaagaaaatgaacacaaatatttacgcgcttgttcacatgaatgccgagtgagccctcgtaaccgctatgtaaaagaacacggtttaacagaagaagagtttgcagcacgtgttaaagaattagaaaaagaacacgtaactttataataaaaaaagcagcacgctatacaaagcgtgctgctttttttatgaaaagattctcttagaacctggtgtttaaagaatgtcatacaacgggtatttatgaaaaaggaaagatattcctagcttttttatttgtttaaaagaatatttttttgaggaagccataaaaaagcttgtacataaaaacgaaaaaggagcttgaaaatggaagcgaaaattgaaaaaaagtacgatggccgtttgcttgaaggacccctatgggatgaagaaaatcaaaaattagtgctagtagacatcttagataaaaagcttcttacgtacgatccaaaaacgacaaccttagaaggtattgctcttccttcagtcgttacaagcgtttctaaaaccaatcattcaaatttgattgtctccacccgtaatcagctgcttttagttgataaaaacaaaaagaatcatgaagagtatatccgcttagatactcttgaaaaaaccatgcgttttaatgatggaaaatgtgatccatataatcgcttttggattggaacgatgagtgaagaagatgaagaaggaaaagcccagctgtacgtagtagatgaaaaaggtgtcattaagagcgctaaagaaggattaagcgtgtcaaacgggctagcatggaatcgaacaggagacaaattctttctggttgattcaccgaaaaataaaattatgtcttattcgttttctaaagaaacaacaaggctcgaagatgaaaaagtggtgattgacctttcagatatggacgggtttcctgatggaatgacaattgatgaacacgatcgattatgggtagcactttggggaggttcgaaagtcatttgtgtagatccagataaaggagaaattatagaatctattcatcttcctgtttccaatgtaacctgctgtacatttggaggagacgatttacaaaccttatttatcaccacagctaaggaagaagaaaaatacgaagaagctgccggctctattttttcatgccgagtaggagtaaaaggcgtgccggcttatacttacgtgtactagataagcgcttatcaaaatgtaaagattcctaaagcccagtaacgagagatgttacatacagcttctacaattcctttacattgtgttcatttctttacattttattctttatgtggaagaggaataaaatatggggacaacgaatttccataaagaagccttttaaagaatatgaacacttctattgggtaataatgggtaaaggtagaaaaggaggaattgttttggaacaaacattgtatgaaaaagtgggcggacaagaagctattgaaaaagtagttgattatttttattctgagctcgtgttaaaagatgaaacggtcagtcactttttcgagcatacggatatggataaacagcgtcgacaccaagccaagtttataagctttgccttaggtggaccgaatcaatattcaggaaagtcgatggccaaagcacatgcaaatatgaatattcaacccgaacattttaatgcaattgctaagcatcttcacgatgcacttgctcactttaatgttgaagagccggatattgaccaagcattaaataaagttgaatccctaagaaatgatattcaatataaataaattataaaaaagaaggttactgtgaccttctttttttgtgctcaaagctgtgatgtatgaaggaaacatggaaaagacatcgtaatatgataaaaatgcaataggtaaaaatatttatcgaaagtctgggagtgggagtatgtcagcaattaatgggaagcaatacgtagagagaattaatcaattaaaagcaaatgtatgggttgatggcaagctcgtaacaggcaatatatcagaacatccggcttttaaaggagccattaacagtcaagctaaactttatgattttcagcatgataaaaaaattaaagatatcatgacataccaatctccggattctgaggatttttttggtacatcttatttacagcctacaacaaaagaagagttaaaaaaacgacgagagatgactcagcaatgggcgcaattaacccatggtatgatgggaagaagtccggattatatgaataccgtattgatggcttttgcatcctctgcagaactcctgagaggaacagaaaactgctttcctgaaaacatcatttcttattatgaatatgtgagagagcacgatttatcgctcactcatacattcatcgatcctcaagtcaatcgaatccaattttattacgagcaaaacgacgaaccgatagcagcaaaaattattgataaaaacaatgagggaatcgttattcaaggcgcgaaactgcttgctacacagggtggaatgacggatgagctgctcgtactgtcttcagcgggcattcaaggaaaagaaaaaggatttgctttttcgattccaagtaatacaaaaggaattaaatttatttgtagagaatcatttgcaggaaaagattcggcgtttgattatccattaagttctagatttgaagaaatggatacaattgttgtctttgaccatgtattagtaccgtggaaccgcgtgtttttctatgaaaatgtagacgtatcaaatacattccttgcttctagttccttctcagcttttgctctgcatcaagtaacttcaaggagaattgtcaaaacagagtttgtattagggattgtacaatctctgattgaaaccattaacattatagactatccgcatgtacgagaaaaagcaacagagcttattattgcgttagaaacgatgaaagctctcgtgatgaaagcagaagaagaagcggagattgatccatggggatacatgcgtccgaatgaaactacacttcgtattgccgcaaatatattttcaaaaacctatcctacctttacagagattatccagattttaggtgcgagcggactaatagcaataccaacagaaaatacgtgccactcattggttaaagaagatattacgcgttatttgcaagctaaatcgagaggggcagaagatcgtattaagctttttcgactagcgtgggatttaactatgagtccgtttggtacaagggaaacactgtatgaacgttttttctttggggagcctgtacagttaaccagttatctgtacttatcttacgataaagagcgctatgtacagagagtaaccgattttttgaaaagttaacggaggaaacaaacctccgctgggtatgatagtttcgttaccaaaacagcggagatgcttattgaataaatttgaaaaatctgcaataattttcagggaatcatttctgtgaaaatactaaggaatactataaagataggatgttacaatgaagcaattaatctattttggtttagaacaagcaaaatcttgtgtttttcctgttatcatttttcttacattggctatgacaaaaacaattgaagtaccatttatttctagatatgaccttattttattagtctgtctaggaactcaagttttaatggtgatgtttaaacgagaaacgcttgatgaagtaaaagtcatcgcagtatttcatttaattgggctagcgttagaactctacaaagttcatatgggctcatggagctatccagagaaagctttcactaaagtctggggagttccgctgtacagcggatttatgtatgctagtgtagccagctacatgtgccaagtgtggagaaggcttgaattaaagcttacgaattggccttctacgtgggttgtcagtatactaagtatggctatttaccttaattttttcacgcatcattttatttacgacttccgctggtttttaaaactttttactttacttattttttatcgaacttttgtatattttacggttaacaaacgtacgtatcgcatgcctttagtattgtcttttgtactgattggctttttcatttggatcgctgaaaatatcgcaacatttttcggggcatggcagtatccagatcaacagcagcagtggacaatggttcatataagtaaaattagctcttggcttcttcttgtgattattagtttcttgattgttgctttactaaagcatttaaaagaaaatcaaaaccaatttaaacaaagggagaaatcaaaagaaacaaatgaaatatatgaaagatagaaacataactatgtatatgtacatacacactattaatatgaagtgcaggatctttggaggcctatatgcaagaatatattttttatcttccctattttaaatcagcggggaagaccgtagcagttaaaaatgaaaatggagaaaacgtcggacagcttaagagagcgcataaaaatatgtggactaaaagtattgattttttaactcgtgatggacttccagttttagattctatttcttggtttcctatcttctcctgcggcttaaaggtacatttacaagttcaatgggaaggaagaacggtgcttattgatcacgtggaaaaacaccggtgggtgataaaagaaaatggaaaaacagtggggtatctattagggaaaggaataattaaaaacgaaggggaacaagaaattagatggttaaataacgtctacatgttaagcagtcatgaagccatagaggaagcgtgtatttttaatcaaaaaagagaaaaagtcgcagagtttaaatcagacctttttcattttaaagaaggcaaacactcaataagagtaatagaagaactgccgatacccatttttatcgcttcttactatataactaattttattatgttatacatataatcaggcgcagattgattctgcgcctgatttttatatcatgattttacaaatatcatttgtgaattcaacgggatcactaatagataagccttcaattaaaagagcctggttatataatagatttgtataaaggtctaatttcgctttatcattttcaagtgcttcttttaaagaagcgaacacatcgtgatttacgttaatttctagcactttttctgcttttacatgctgattgtcaggcatagcacttaaaattttctccatttcaatcgttacttcaccatcagctgataagcaaacgggatgtgtttttaaacgtttagacgcgcgcacatctcctacttttcccgccaaagctttcttcatatagttaaatagctctttattctctttttcctcagactcattgagctgttcttcttctgattcaatccccaagtcactgcttgaaacagatttaaattctttttcttcatacgtcattaacattttaatcgcaaattcatcgatatcctctgtgaaatacagaatttcgtatcctttatctgcaaccaattctgcttgaggaagtttttcaattcggtcgtacgattcacctgatgcataatagatatacttttgatcctcaggcatgcgcgatacatactcatctagtgttacgagctttttctctgtagaagaatagaataaaagcaggtcttttaacaagtctttgttgctgccaaaatcactgtaaacgccgtacttcagctggcggccaaatgagtcataaaacttctcgtacttttcacgttcgtttttaagcaagctttttaattcatttttgattttcttgccgatgtttttggcaatcagctgaagctggcggtcttgctgcaaaatttcacgtgaaatattaagagataaatcttcagaatctaccataccttttacaaagctaaagtaatccggaagaagatctgcacatttattcataattaagacgccgtttgagtagagttcaagtcctttttcaaattcttttgagtagtaatcaaacggactattttctggaataaataaaatagcattgtagcgaatcgttccatccacgttaatatgaaggtgagtgagcggtttatcaaatccatagcgtttttctgaataaaactgctcatagtcttctgaagtcaattcatttttatttttcttccagatcggtaccatactgttgataacttgttcttctgtataatcttctagctcgttatcagaaccttctttaggacgtttttccgttatatccattttaatcgggtagcggataaagtctgaatactttttaatgatctcttttaaacgatattcttctagatactcatcatatgtttcatcttctgtattttctttaatttttaaaatgatttgagttccaaccgtttcttttcgcaccgctcgattgtataaccatcagcaccagtagattcccatttataggctttatcgctgcctaaagctttactaatcaccgttacgacatctgctaccataaacgctgcgtaaaacccaacgccgaattggccgataatcgtgtgcccgtcctttgtttcattttcgtttttaaacgcaagagagccgcttctcgcaattgtgcccaagctgctttcaagctcttcttgcgtcatgccaattccagtatccgtaatggttaaggtacggtcagctttatctggtgttacttttatgtagtagctttctttgttaaaatgcaaggagtcgtctgttaaagctttgtaataaattttatcgattgcatcacttgaatttgataaaagttctctcaaaaatacttctttttgagaataaatggaattaatcatcatctctaataatcgctttgactcggctttgaattctttttttgacataagaagttctcctttccaaatagggcttataaaataattagcacttgagttgatagagtgctaattactcttcttatttaacatgtattggggtatttgtcaatatattaggagattcaccaaagagattaaaaattagactgaaaaaagcaaacttttaaaaaaaggttgaacgttctgaaagagtttgctagaatatacttaatttcaaagactatatgtgactggcgaaacgcggataaccgtgaggaagcatatagtgacgtagccgttcgcctgggcagaggtaagggattaatacatatctcttacctctttctgtttagggggagaggatatagaagttatcagacatgtaggctgaaaaaccagacttttaaaaaaattaaaaatgaagttcctttatccaaaggtaaaaacatgtaaaactacgatgataatcagaggagagtacaaaatgagcacattaacattagaaaaagtacaaacaatcaaaactttaaacaacattgcacaaaaaggtctaaatgtttttaatcaagaaggttatcaaattgacaacgacagcgaacatccagatgcgattgtcgtgcgtagctttaacatgcacagcatggcatttgaccaaaatttaaaagctattgcacgagctggagcaggggttaataatataccggtggacgcttgcacggagcaaggtatcgttgtatttaatacgccaggagctaatgcaaacgcagtaaaagaaatggttttaactacaattatggcttcttctcgtaacttatttgctggagttgaatggacaaaaggattagatggccaaggtgatcaaattcctaaattagttgaagcaggtaaaaaacagtttgttggaaaagaaatcaaaggtaaaacgttaggtgttattggtttaggtgcaattggtgctcttgtagcaaacgatgcgcttgatttagatatggacgtaattggttttgatccattcatttctgttaatacagcttggaatttgtctcgcaacgtacagcgtgcaatgtctctagaagaactatttgcagcatctgactatattacggttcacgttccattaacggacgatacaaaaggggttttcaataaagaaacgttcagcatcatgaaaccggatgttcatattttgaacttctcacgcggtgagcttgtaaacgaagaagatatgaaagctgctcttgaaagtggaaaagttggacgatacattacagatttcccaaatcaaaatgtcttgaacatgaaaaatgttgtgccaattcctcatctaggggcatcaactcaagaatcagaagaaaactgtgcggtaatggcagcacgtcaagtgaaaaatttcttagaaacaggaaacgttaaaaactcagtgaacttcccgaatgcatctcttccttacactgggaaaaaacgcgtagctgctttccatcacaacgtgccgaatatggtaggacaacttacgcaagtattctcaaactacaatttaaacatcgcagatatggtgaacagaagccgcggtgaatatgcgtatacaatgatcgatattgacaatcaagtaagtgacgagattgtgcctgagctagaagaaaaaatcggtcaaattgaaggaattattacaagtcgtattatctaatttggttcccgtcatattttagtgttacagccctaacttagaaaagttagggctgtttttacatggtgtttacctcatatcaattccttcattctcatagcatatagaaatacctttaaagaggtgaacgttttgacaggagaactgataggaattttgatagggtcgctcatcgcgctggcaggaacattcattacgtctgtcgtagctatagtgatgtcgaaagagcaatacaaacaagagcttcgcaaagcatttatccaaaagaaagttgatgcctatacccatgtgtgtcaagttattctagctataaaaaacgatttacttacaaaaactgtttcttcagctggcttaaactggacggctcaatctattaacgaactagcagatgtgtgtattacggaaggtctatggatcgatgaagaagacagcaaaaagctggaggttctgcagaagcagctttcaaaatttgtatttgatgaaatagaactgtctagacatgatattctcacagcctgttatgaaattgttgaatattgtgaaaaaaaggtaaggattcttcattctatgactacaaaagaataggtgattactactttaagaagtgatagtagaagtattaaaaaagcatcggtcttaacgattgtataagaagtgtatgagctatttcatatttcatacagttcttaacaaacagtaagtgtttatgaaaagaactttgcagcagcatacaaagttctttttttatagcttgcgttttttcgtttgattgtggatatcactcaagaaaaacaaagcaagcaaaaggataattctaactacacaagccatttgaatggtatttaaggatgttgataactaagggattaaagcgataatacataaaactaagctacctagtacaatagcaaaacgaataacgaataacaaagacgactgttatagaacgaatgccatatacagctgatatactaatcacttctttgtagaatgaaataacttttttgtccaggggataagcatgcttaacatctcacgttaatgtctacattcacattatcttaagtttcaattcatactggcttcatataaattaatcatactgaatgtattaatgaaagatatgaggtggaacaattttaaaaaagcttgttaaactatttagacaagaaaccgagatatctaaagataaagaagtagatctccacgaagagaacgattttaacgaagtttgtgatgatcatttcattatagatgagtattagaaaccctataaaatgctgcggaatttaaagaattgattgagtatattcgtataaccagtaattgcacaagggtcgtaaaggtatacttttacggccgattaatattgatgaattgctttttacatgaaacaatgtgaaaaaaatgggcatcctagaagcaaaaggaggggatagaatgggcaaagaaccaaatgatgaaacaagtgaagggctgaatcagctttttgaaatcatcaatgcaaaaggcgacgagggtgaacttagagaaattgtcagcaggagcagtgaaaagaataatcataaaaatcatgaggatcaatcgtaaaaagaaaataaaaaacctcttcatggaaatcatgaagaggtcagatgaaatagtattgcaaccattccatcctgcagagttttaaagtgttttaaactcttgatacgactggttttatggaactgatgggattcgaacccacgaccccttgtctgccagacaagtattctcccactgaactacagtcccgattatgtagagcctttattgcgtgttgactctactatattttaatacgtatgccgcgcgttcgcaatagttattttcagtgttttctaatttcttcatatgaatattaacttttaaaaaaatcatttacttcttgtttatacgtataaaaaaaacttggaatttggcttggttccaatccttgtgcagcgtatttgctgatggattcgtagtaccatttctgcttttcgaatcctcttttaaagctattccaaatcgtatctccttgctgatcgtagctttcttttaaagaccgtaaattgtctaatttgtctgctacaattaaagatttcacttcaagagaaccagttttcacaatttgaattgtatgctgtttacgttcttcccagctttttgatttgttttctgtatgagcttcaacaatccccgctacctctaaaccaaatctttgtacaatttcttcgagtgttacacttgtatcttctacagcatcatgcagataagctgctgcaattacttcttcactaaaacctgctttttctaaaatattacctacgttaataggatgaacaatataaggtgtatcagacagcttgcgcatttggccgctatgagcgtgttctgcatatctacgtgcttcttttattaaagacatcatattcctccactttttattcagtatatcttcatattattagtataaacgaatatagctttcctcactttataaaattgcaaaaattcatttcttataataagggaaggctaccaaaatcccttcttattgtagtttttttataaagcctaatatctatttaataggcctgtatcagttgccatttccttttttattcatagtttgtatgaaggagtgatagaatccatttaatacacaggtcttaaaactaaaaggaaaggaggagattcccattaaaaatcgtgataaaagacgcaagagaaaacgcggcgcattaaaagattatctgaaaaataagcttggtcagctaaaaccgaagccaaacaaaggacctgtctcaaatttgaagtcttctgcttaaaacatccccctagtttttatatagggggatgtttcttttgaattttcttttattttaaggtttaaatgttatgagtggcatttaagggttaatttgtgcacaatagacattgaatagtttatctaatacgacaacgtaaggagagattagacgatggaaaacatgattttaaaacatatggacgttgtaagaggaattacgattagtatcctcgaaaaaacaacagaagaggcagcggacatcacaccaaaaggattcaataacaatatccgctggaatcttggacacattgcctttattcaagaaaagcttgtgtttggcttagctggtgaaccgatgcaaacgcctgagagttatgaaagctttttcggcgcaggaacaaaacctgccgattggacggaggctgctccttctcttgaagaaattgcgaatgtgttgaaagaccaagcacagcgtattaaagagttcatgcccgggcagtttgataagcagttaatcacaccttttacaaataaagcgggtattaactttacaacagttggcgaaacgtttttattcagcttctaccatgaagcgatgcatgtagaaacgattaagaaaattgggaaatctgcagcagaataaggaaataaaaaagaataaatcacatattctttataactattttacatagcgcctatgcatatactgatctatacagcgcataagatgtaacatgagctgcttttcctaatgcagttcgcaaggaggtgacaacgtgaaatttctttcaggtttaacgactcttcttgtgattttaggcggtttaaattggttggctgtagcattaggcgtgaatgtagtagaagagctatttggctcttgggattggttagtaacaacgatttattggttagtcggcctgtctgctctttatcaaatttttgataagttcttcggaacgggagcgagtgtcaaaagcaaagcgctataataaatattattttttattatctctttagggagtttgaatgtatattcaaactccctttttcatggagaaaagatgtgacaactttacaaaatatggtaaaataaggtaataaccaaaaaataggagggatgagatggagctttggggtgtagtacctatcttagtgttcggagttctttatataggaatcattgctggtattatagctgttatcgttatagtgttaaagcgaatgaaagagagaaatcaatatttacgtgaaatacgggatgaactgagaaatcaaaacagagcaactatagcagaaaataaagaatagaagagggtttaatagatgaagaaaagtgtacttcctatattttttatcgtaaatcttttttttatttactgtttattatttaatcaaggatacatctttcagctaaagaatctaccttacatatgggctatttatttacttcttggcacctgtttagctttttattatatgctgcgatacaaacaaaaaaaagacggacaagtgttgctttcaatcggcattttaactacaagcattagttcacttggctgtttaggtttcttttacttcttttatcgcgcaatgggcggataagagagagcaccacaagcagggacttcagtgaaagtctctgctttttatatttggatctattgtataatagaaaaaaagaaatgaatgcaggaggggaactatgcgaattgtttcgctttgtccaagcaatacagaactaatagcgtatttaaaatgtgagcatttgctcgtagcaattgatgattattccgattggccgcagtctattcaaggtctgccgcgtttaggtcccgatttatctattaatatggatgcggtggaagaagctaaacccgatttagtcctagcatcactaagcgttcctggaatggagcgaaatattgaagaactaaaaaaacgaaagcttccttatatcgtatataatcctaattcgctaaaagatatccgtcaaaatctacaggatttaggtcagcgattaaacattgaaacaaaagcagctgaactgttaaagcgttatgatcagtttctttctacatataaagggattgcaaatcaaattgacgaaaaagccactgtatactgggaatggtggccaaaacctgtctttactcctggcaaagcaaactggctgactgaaattagtgagttagcgggaggagaaaatatatttgctgatcataaagaagcaaatgtacagagtgattgggaagaagtgctcaaacgaaatccacttcatgtgtgtttggcttgggtgggcgtacagacaaacaaaatgaatccaaagattttacacaagagaccgaactggtctgacatgtctgccataaaagaacatcgcgtatacgtactagaagaatggatgtattgtcgtccttcacctaggttgctgttagggttaaaaaaactcgcgccgctccttcatccagatacgtttcctgtatttgacggcaaggaccccttactataagaaaaaggagcgatacatatgaaagatataaaacaaataaaacataccattcaacaccgctatccttttttacttgttgaccgcatcttagagcaagaagaaggaaagcttgcgatagggattaaacaagtaacagcaaatgaaccttttttcaaaggccactttcccgactatatggtaatgccaggggtacttattgtcgaagctcttgctcagctcggtggatttgccatggctgcggatgaccaacaaaaaggaagacttgcttttttagcagggatagacgaatgtcgttttaagcgtcaagtaaggccaggagatacactgcgtttagaatttgaggttctgaagcagcgtggaaagattgtaagaggaaaaggaaaagcatttgtagatagcgagttagcttgtgaagcggtcattacctttgcccttgatatataatacaaaccaggataaagcgtattgaaggaaaccgccttatggcataagggcgtttttttgtaaataccttagtcaaacttccttttgatgaaagaagaaacggggtatagaagaaaaaaggagaggggagaatgcggtgagaacattcacggaagttgttgtattactcacactattgggtacgtatataggcatctcactacttgtctacaaacggaaaagaacgaatccgtttttctacagcatttacttttatttagctaccagcgtcattttgatttgcttggttatcttttggcttcagctttgttttggactcactgataagcaagtaggaggattgcttatcagtgtggttgcattctttttacttatttatgggttgttaaaaacaaaacagaaagacaggtagccgatgctatctgtttttatttatattcatgttatatatttttatcaattttagtgtcaattgaatggatctcttcatatactaaagataacagctttcttttgcaggttagttgacatcgtagcttataactcgctattcttttgataattcattttgtgaaaggaagtggacctatggatgcatcccgtattatagctaagttagaaaatcggataccgacaattcttgggatggagcagttttctcgcttcggtattcttgttccgcttattgaaaaacaaggggaactgcatgttttatttgaggtaagagcgctcgatttacgaagacagcccggagaaatttgttttccaggagggcgtgtcgagaagacggatgcagacgaaaaagaaacggctatccgtgaaacatccgaggagttagggattacgcctgaatctattcagcaagtacaagctttagattatattgtttctcaattcggaacaatcatttatccttatgtaggttttattgatgagttgcttgaacttcgaccgaatccttcggaagtagcagaaatatttaccgtgcctctttctttttttcagcgtaccgaacctgatatacacaatatccatttcagagtagaacctgaacataattttccttatgacgcgattattggtggtgaaaattataattggcaaacaagagagatggaagaacatttttattactatgaagatcgagtcatatggggactgacagcaaaagtgatttatcatttaatacatgtactaaatgataaataaaaagcagcgaatacggattcgctgctttttttatattaaatagattgaatagcctctgcgataggcgtatcgcctgaaactaaatcaaaagaacgtccgaatgtatgatcttcacttagcgtttccactaccacacgcgctacatcttcgcgaggaatggatccgcgctctttgttctccccagcatctacacgtcctgttcctggttcgtttaacaatccgcctggtcgaacaattgtatatgttaatccgcttgcttctaagattttatctgcgtaatgtttggctacatagtaaggaattagtgaagtattccagttttcacggtgatgtgcttgaagtgcgcttaccatgacaaatcgtttaatacctaaatcttctgcagcttccatcgcttttaccgcaccgtctaaatcaattaaaagtgtcttatcatggcctgtatttccgcctgatcctgcgctaaagataacggcgtcacagcctttcatcacttccttaatttcatgtacagtgccttctaagcttgcaaaagccgtttcgatacctcttgcctcaagttcttttgcttgttcttctttacgaaccatcgcacgtacagtgtgcacatcactttcattcaaaatgtttataatatgtttgcctacttgaccattcgcaccaattacaagaactttcatgtctaaatttgctcctttcaaatccaaatgcttatatataattgtttcatattcactcttttcattcaataaatgagctcaaaatccagtgaataaggggaaagtaagaaaatatattaaaaaaatgaaaaacaagaaataaaaactaatttacaaacaaaaaaaggaaaaaaatagttcgttaaacccagtgtctgaactatttaaattttgtaaaattttctcaaacccttggtaatacaacacttcttaaaaacagtatctcttttaacatttcccgatacaacctatataaacacattttgataattttaaacttttacttcggaaattttttttgttattatgttttagtcattaaaatattcataaacgaaatatttagtccgagcggacaaaggagaggataaaatgaacacattacaatacttagtcgcagaacgtgcagagatttctcctcaacatgaagcactagttgaacataatgaacgttatacatttaatgaatttcatgaaaaagtaaatcaattgtctcattacttcttagagaaaggaattcaaaaaggagatcgtataggtgttttagctcatacaagcattgcttacccagtcgttacaatggggattttacaagtgggagcagtcgttgttccattaagtaagagcatgacgccttatgagcttgatagcattattacgagcggacagttaaaagcgattatccaccacaatgaatttacgtctgtattagaaaaagcggaacaaacggagggacttagtttcacgttaaaaattgaggatgcaaaagaatttacaactcaattctcagcgtataacacaaacacaccagaagcacttcctgaagtgcttcctgaagatctagcattgatgatgttcacatcaggtacaacaggtaagtcaaaaggatgtatgattgcacacggatcggtaagtgcctttttaaattctggcggacaggaaaaacgtgcaaatattgataaaaacatgcgctatttgtttgttcatccattcttccacatgagttcgatgagcattttatttatgtgcattaacacaggaaacacaatggtatgttctgaagaaacagatccagctaaagtaattgaggtaattgaaaaagaaaacattaaaatgctgtttgcactaccacctgcattaaaatacattgtagaagagcttgaaaaaggagatcactatgatttccctctaaaacttgctgtgtcaggcggaacaaaagtatcagagtctttaattgaacaatatgatcgtaacggaatgattttagctcaagggtacggaagcacagaagcttggattatcagttcatggcatcctcaaatgggatggaagaaagtaagctctgctggaaaacctgctccacatgtggaagttaaaattgtagatccggatacacgtcaagaagtaccaactggagaaaaaggtgaagtactcgtacgaagcccttatcttttcaaaggctactggcaaaacgaagaagcaacaaacgctgtcttacaagatggctggttagcgatgggcgatgcaggtcgattagatgaggacggatttctttacattgaaggacgctataaagatgtaattgtatatggaggagacaacatctacccagatcaagtagaagaagttgtcctagcagcagatggggtgttagaagcgacagttgtcggcatgcctgatgatgtgtacggcgaagttccatatgcatttgttgttaaacaagaagcatctgctttaactgaagaagatgtagtgaacttctgtaaagaacgattagcaccatataaagtgccaactgttgtatttgtttcatcacttcctaaaaacagcgtaggaaaagtgttgaaaaacgaagtgaaaaaacaagccttagcacacgcataataaaaaagcggcctttatagccgcttttttatatttattgctgtaatttttgagatatttttttcataatgtgaaagtattgatctctttcttcttctgataagtgtgaaagtaaatctgaccaaaaatcgacacgagtagcttgcaatatttcgacaactttttcgcctttttccgtcaactccacccacacgcttcggcggttttgctttttataaatacgattcacaagctcatcatcttctaattgatttaatacaatggtgatagccccaggtgagagtccaagtacttttgtgatatcgctaacaatacagctttttttatcgtgaatggtctttaagattgcctcttttgttgaagttaaatggtagggaagcaaatcatatttctcaccgattacggtgtttttatattttaaaagagcttcttttacatgatctatactttctagctgatgactaatctcttctttgctataacgttcagtcaagcgtaaatcctcctcataaaacaaattccatttttaccattataccatgtataatgcccatagaaaaatgaacaacaccggggaaattgtcagaaaaattttaaaataattaccataattcgttaaaaaatccttgttttcgtgctattatatataagaatagtaataacaggaaacgcatacaacatttgttttctattgagttcataagaaaaaatggggtctatgaacatcattccgctttacctcatgtgttgaacaaagaaaaaaatataaaaaatggtgattattcactggctctttctcacttttggtgaaggtgctttatagatgatatagtgaaataaaaaggagcgaatctcaacatgcctttttcttctttcactaatatagaatgcttacgagttatacaagaagatcaannnnnnnnnnnnnnnnnnnnnnnnnnnnnnnnnnnnnnnnnnnnnnnnnnnnnnnnnnnnnnnnnnnnnnnnnnnnnnnnnnnnnnnnnnnnnnnnnnnnagtttgtatgaaggagtgatagcaatgcaaaaccgtaatagtcaaaatattaaggtcattgatgtttctcatcacaacggaacaattgattgggcaaaagtggcgtcggatggtgtaaaaggcgcgtatattaaattaacagaaggtacaaccttcttagataaaaaatcatatgataattatataggtgcaaaaaatgcaggtctacgtgtaggcttttatcactttgctcatgctgataatgatcccattgcagaagttaatttctttttaaataaattaggcagcatgaaggttgatttgcctcattgcttagatttggaagaaaataaagggaaaacaaaagcgcaggtcacagcctttgcagttagatggatggagtatattgaaaggaaaacaagcattacgcctattctttacacggggtatagttttattaaatccaattttacaagcgctgtggcaagatatccgctatggatagctcgttacagtggaagtaaccgttctaagggatttgttaacccaggtgatacggcgatttgggatagatggtctatgtttcaatatacagatcaaggaaaagtaaacgggattaaaggcaatgttgatatcaatgaaatgaatctggatttctttaatagtattaatacaggcgtgacggtggtggaaaataataagccatcagcacaattgcagcaaggtgatagcggactagctgtaaaagaactgcagcaaaacttaattagattaggatttgaactttcccagcaaggaaccgatggtcaatacggcagcgaaactgttacagctgttaaagctcttcaggaaaagtatggattaacgtcaaccggaaaagctgatgagaaaacattagctaaaatgatggaactccttaaaggtgtaagtaatcctatagaagaatcgttaccaaaggttacttcactcggagataaatattcttttcaagtaaaagcgaagaaggatattggagtctacaaatatgcgaatataacagagaattttagaactataaaaaaaggcacggtatttagcgtatatggctatacgaatgcagcatgggctgttccaggcggatttgtgcaaatgaaagacgtagaacctatcccaattacaattaaaacaggcggattaagtaaagacatggaaacagagtttcgtgctttcttaaaaaatgaaggaattgacagtgaattacacgtacatgcaataggtaatccgtcagctgaactcacagcagctggactggatttggtaaaagttaaacagtttttagataaaaaaggctggtactacaagcaataaactcccgctccgaagagcgggggtttattttggtattttgtaaaaaaagaatagcagagatcaattaagtaattaaaatatgttctaaataacaaagtaggtggtaacaaaaaagtttctatgtatagttcacctctaacagtcatatttttagtcaacggctcatggagggtgaatgaatatgaaaaatacgcagattcgaattgaaacactatcctatcactatgaaaacattatggtgaatgatgaagtagagcgtgcgataaaaagtatcgaagtgacgtatcgagcatataaacataaccacgttttaaacggacatgtagtactttcaggagaagagatttacgatcttcagcagctgactcacgcagtggctggaaaaataaaagcagaattagaaactacataaaaaagcgcctttctttaaatcttaaaccaagattaaagaaaggcgcttttttattaattaaattgcaaaaagaagaaattaaagtatgttctaaataaaatatataaataaaaaacatagcctctaagagaattccttaaagcgtacacattatctttgcattgtgaactttgtctcttttaccactacttttcttttactatgtgtaagcaacacgccgcataacgtaatgatgcttccaataatggaagctgcactcgggatatcttttaaaagcagccacgctaagaaaaaggacagcgcaggagttaagtaaagagaaatggcagcctcagcagaacctatacgcgatgtcagataagcgagtaccatatagggaataacggttggaaataatcctaaatatgtcacgcttatcgctgatctgacagagatatgtgcaagttctgtttctaacccaggtaaaaaaacaagcatagaaattgtagccccccaaatactgtacgtcacaaaagaaaggaaaccatacttttttaataaatttttttgacatactatatagatgctttctgcaagggcagctagcagaatcagtaagattccattaactgagtgtacaaagttctcttggctgaaggttaaaagtgtaatacccgcaaagcttactgcagatccaatccattttctttttccgaactcctcctgaaaaagaaaaatagctaaaagtgaagaaaaaataggagtagtcgagaccagtaaactcgcaatacccgcactcaccgttttttctccaatgtttaatgccgtgtgatatacggtaaaacctaaaaaaccgagtgctaaaagaagtggaatatcttttatatcaggcaagcgcatgcgtgtgactattgcaataactaacagcactaaagaagcaatacttaaccgaacaaaagcaaggtgctgaggagaaaacgattccagccctatttgaataactggaaatgctgaagcccataagctaatcatcagtatatgtaagaacaccaaactacacgttaatttcatgctattcatctccatttttcattttgaatccaaccagtatctattgtggttcccatgttaataaacatttgataaaatgtcttcaaccagtttaaaagcaattaacccaaccactttaaaaacaggagtaagtgtatgaatcaagagaacagttcgagttatccaaaatacaagcaaatcattgattttatgaaagagaaaattgcgcgtggagaatggccgattggaagtaaaattcctagtcagcgaaagcttgctgctatgttcgatgttaaccgaagtacgatcatcacggcattagaggaattaacagcggacggtttaattaaaggtaagatgggaaagggaacaactgttataaataatacatggacactttttgctacgactccgcccgattggaatgttcatgtgaaatcaggtatgcatcgtccgagtcaagcaatggtacaagatattaatgaatccgaatttaactcaaatcttattcaattaagcaaaggagagctttcacctgacatattccctaaagataaaatgaaatacgccgtagaaagagtagcagaaaatatggaggttctgggatacgaagaaccaaagggttattttcctttacgaaaagagttaagtgcatatatgaaaacaatagggattgaatcttcttcagattctattttaattgtttccggcgctcttcaagctcttcggcttatttcaattggactgctgcaaaagaactcttcggttttgttagaaaaaccttcttatctatactccttacatgtatttcaatcagctggaatgaacctcaaaggtcttgctatggatgaggaaggaataaaagtaacagctataaaacgcgccgaccctcaagaagggcaagctattttatatacaaatccatgtttccataacccaacgggaacattaatgtcctcaaaaaggcgttacgatttgctgaaagaatgtgaggaacatcagcttcctattattgaagatgatttataccgcgaattatggctaaataaacagcctccgttgccattaaaggctttagataaaaatggacacgtgttatatgttagcagtctttctaaaacattaagcccgggattacgtatcggatggatagtcggcccagaaccagtcattgagcgtttggcggatattaaaatgcaaacagattatggatccagctcattgtctcaaagagtggcagcagaatggtttaaaaatggcttatatcaacagcatatgaaaacggtacgaaccgaattgcgaacaagaagaaaagttatgctgaatgctttagaaacatatgcaggagatgtagcgacatggacgaatcctgaaggaggcttttttatatgggtgcatattcacccttctatttcaatgaaatctttatactctcgtgctttaaaaagaggaatattgcttaattccggaagtatctatgcacaagaaaccggcagttatcttcggctttcttacgcctatgcttctttaccagatatcgatagaagcattaaaattattgctgaacttattcgggaattgcaagtataataaaaaggagtagtggattacccactattcctttttatttgtatcaaactcttcttcctataaaaaactccaagtaacaactgactatatattcccgtctataaatacatgttatcttttatgacaaaaataagttaagaagacttttaatttgctttctgtatgttttacatataaatcgtgaatggttttaactacgtaatcattatcaaacattttcaacacctcaattattgttaagtttcctgtttgttatagtttatgaaataatcagaagcatatcatccgccatcagctgtaactttgcggttcatcttttacaactaaaggctgaaatgtacgctcatgattgaacgcacgaataacaggatatgcaaaaaaatgaaaagtgtgcacgttttgttttaaaaaaggtatatctttaaaaaaagaaaattgtcacacacatttatgaatatgtatctactaagtaagaagacttttttagttggtgggattgaaggtgaaaaagatggatgaattatttaaagatcttgatgtgtacaggacgcaagaagaaatgaagcagtattttgaacatacgcagaaaatgattcatcaaaacagagaatatataaaattagcccgacttaaaaaagggcgtttcaaaaagttttttgaagagttttatccgctttattgcttcagccaatcttcctattgtccgaggaagtcaaaattgaagcttattattggaagtcaaggatacgacggattaattcttcaaccggatggtactgaaaaacgaattgaaattacttcttacaaagatgggaaactggaatttgaagatgcacagagggtgaattcaggaaattttgctctacctcgtatccagacggaaggttctgtagaagagtatatagaaaaagtgctagaaaacatccaaaaaaagagcaaaaaagattacagtggagcatccattctatttgttgtacacacgtttcattattttgaagcctatggaaaaagttcagctgcctttattcgtaccttaaaaaaagaaatgaagaatactgattttcgagcggataaaatttatttattggaattaaatcagccagaaagtgaaagtgttaagcaaaacattcatttcattaaataagaagacacgctgcagatgttgaggcgtgtcttcttttctgataaaagaactctcttaatacaggtggataattttgaaaatttcaacaattaagtgctataattcaagtatgaatatgcattcagaggaggaaaaccgatggatttagcttatagagataaagcttacgaatatgccaaaagattcgaatctagctatgacgattatgatgaacgctataaggtgcacaataatccgacggtgtggcgatttatgccgatgtctgattttcaagatttactggaaaccaatgcgctttttttcgcaaaacctgatgcattttcggacccccttgaaggatgctcttcaatgtggaacatagaagagttaagaaaaaaaggcgaacgtcataaccgtacctctagaacctatataagaaaaatccatgaattttctgctgtttcatcctggcatatcaatgattacgaagccgctggaatgtgggatttatatttaaaggggaatgatggcatagctattaaaaccacctatgaaaatttattgtgcagtattaaagatttacgctataaaatcttctctggcaaagtgcagtacatagacttccaaaaagaaatggtcagtcactctgtatatgacacgttattttacaagcgcaaatcctatcagcatgaaaatgaattgaggcttgttattgtagcaagccgtatacacgcttggaagctgcaaaagctattcgaaattcaaggtatttccgcaaatcaatggcaaaaacgaatggatatccttgaaaaaagatcgtatgagttttctcatgagcatggtaacctcctgacatgtaatttacatcagcttatcaatgaaatttacgtatcaccaagaagcgctcaaagctgtgtagatgaagtaaaatcccttgctaaaaaacacggactcgcttataaaaaggtcactcagtccgacttgtataaggactatatttattaaatgtttatgttatttgaaaacaggtaaatcagtagtaaaagatgttttcaaggaggaatacgatcatgccttacaattcattaaaagaactgccggatggagtaagagataatcttcctcatcatgctcaggaaatttataaagaagcattcaattcagcaagtgatgaatacaaagaagaagctaccgctcacaaagtcgcttggaacgcggtgaaaacgaagtacaaaaaagatgataatgacaactgggtgaaaaaatagagacaaaagagcctaaccataatggatttattattttttgaaaaaaatctccgaattaggtttcaattattttttcgggggtatacactctatgtaaggccaatacaagaaaggagagactgtacacatgcattgttttacagcgacttcaagaaacgtattgagcaccttagaaggaagatttgttttgattacaaaaggcacattggtaaacaatcgttatactaagtgctaggctgtctaattaagacagaatactccactattcaaacataaaattaagtataaaaaagaagatgcgttctaagcgcatcttcttttttgttaactctattttccctccctttttgtacttcgtcttatttttccgcataaagtaataaaaaggagggggttatgctgtttgattatgaacaggagttaacgattcaccgaaaagatgctactcaaaagacggcagcgactaatgctgatacttataaaaacatagactgggaacaagtgaaatcagaaaaaaatcttgccgattaccaagctcttgtacgcgtaccttttcctctgattttcaaaaaaaatcagctgtatcctgtatggaatttaagaaagtacgcttttttatttgaacaatctacacctgctactgtccaccctaaactgtgggaacaaggaaaattaaatgtacaagccggcttatatcaagtaactgaaaatatctttcaagtaagaggctttgatatggctaatattacatttgttaaagggaaaacgggatggattgttattgattgcttgacgtcaagagaaacagcagaagaagcgcttaaactagtaaaccagaactgcgggaagcgtcctgttagagccgttatcttctcacattcacatatagaccattacggtggagttttaggagtattacctgactcaacacaaaataaaactagtaaagtttatgctcctgctgggtttatggatgcggttatcgatgaaaacgtcacagcggcaacagcaatgacacgaagaagtcaatatatgtacggtattcaactgcgacgcgatgaaaaaggcttaattgacaacggtatcggaaaagaaatttcatttggaacaatcacgcttattaaaggcatagaagaaatccatccttccgaacatcattcttatgtaagtaagaaaattgacggcgtctcatttcagtttcagcttacgccaggaacggaagcgcctgctgaaatgaacatctatattcctagtgaaaagtctctgtgtattgcagaaaactgtacggccactcagcacaacctctatacgctcagaggagcaaaagtaagagacgcagcggcatgggcaagatacctgcagcaagcaatcgatttatttggccaagaactaacaactgtatttggggtacataattggccaaggttcggaaacgagtcgtccatcacatatatcgaaaatcaacgagatgtttatcaatatattcatgatcaaacattaaggctcatgaatcaaggatataccattgatcacgtcggccgaatgatgaagctcccagaaatcttatctcacgagtggtataccaacggtttttatggaacggttaaccacaacgcaaaagcggtttatcagcgctatatgggctggtataacagcaatcctgtcgatttaaataaactgtttcctgaagagtcagctaagaagtacgtagagtatatggggggagcggacaacattgtcaaaaaagcgcagcgttgttttcaacaaggcgactatcaatgggtagctgaagtgaccaaacaagttatttacgctgatcctcaccatgtgaaggcaaaacttttatgtgcagacgcgcttgaacaattagggtatatagcggaatctggcccttggcgaaatgaatatttaacaggagccaaagaacttcgtttaggtaatataccgctgcctgccaacattatcacaaaagaagtatgggatacacttcctttaaaaaatatcttagaactatttagcattcgcgtagatggattaaaggcaggtggatgtaactatcgtctattgtttgtcataccagatcgtaatgaagtagctctcacagaacttaagcatggaatctttaggtatctcggagatacgcgaaagaaagctgaggtgacggtaacgatgtggcaagataccttatatcgactcacaactacaaatgatcactcttatagctcggtcatatttgttcaaggaaataaatcaaaatgggatttctttttgtcttgtcaggattctatcgatccaaactttaacattgtgacacctgtttctaaaaaatagagcatatgattacagctcagaaagcacatcgttgactttttgttcaaagcagctgtcgcatgtgaatatttctttttcttgaaaagatgttagcctttctccgcagatggaacagcattctatacagtgattgtttcgctcttgttcttttctttcacgtaacatagcactttcctcctttgcagtataaatagtttgtcttatttctttaagtatatactaatatcagcctatgcagggaatataaggcttgctaatgcggattatttataatataagagtgttgtaaagcaccataagttggcataggaattgcatgttaaatcgttgagaaaattcaatgattaatatggggtgaacagaatgtccattacaaaaacagctagtgaattaaaaaaagaacggcagcaagaacaggaatcacttaatttatttttatctactcaaacagttattcaagaagcgcttcaaaagctaggctatggtgaagaagtataccatttattgaaagaaccgctgcgcatgatgacggttcgcattccggttaaaatggataacggatcggtaaaagtattcaccggctaccgctctcaacataatgatgctgtcgggcctactaaaggaggagtacgttttcatcctgaagtaaatgaagaggaagtgaaggcattatccatttggatgagcttaaaatgcggaattgtcgatcttccatacggcggtggtaaaggcggaattgtatgtgacccaagaaacatgtcttttggtgaactagaacgactcagccgcggctatgtaagagccatcagtcaaatagttgggcctactaaagatattcctgcaccggatgtctatacaaactctcaaattatggcgtggatgatggatgaatatagccgactgcgcgagttcgattctcctggttttattaccggaaaacctatcgtactcggaggatctcaaggacgcgaaactgcaacggctaaaggagtaaccatttgtatagaagaagctgttaagaagaaaaaccttagcttgcaagaagcgcgaattattattcaaggcttcggaaatgccggcagttttctcgctaagttcatgcatgatgcaggagcaaaagtaattggcatttcagatgcatacggagctctttatgatccgcttggtcttgatattgattacctgcttgatcgacgcgacagttttggtaccgtaacgaatttatttaccaatgtgatgacaaacgaagaactattagaaaaagaatgtgatattttagtgcccgcagccatttcgaatcaaattacggttcgcaacgctcatcgcattaaagcttctattgtagtagaagcagcgaacggaccgactacgcttgaagctacgcgcattttagatgaaaaaggcgtgcttttagtgccagatattttagcgagtgctggaggcgtaacggtttcatacttcgaatgggtgcaaaataatcaaggctactactggtctgaagaggaagtagcttacaaattacgcaaagtaatggtggattcatttgaaacggtctatcaaatctctcaagaaaatgacgtagatatgagacttgctgcttacatggcaggaatcaaaaaatcagctgaagcttcgcgtttccgcggctgggtataagatgaaaaaacgatttggactctatgttccaaatcgttttttatttgcctgaactgccaaataattaaaagaaaacctgctaaaaaaacaaacacgcttaaaaaattggcatatttatttatcgcaacccggatgatggcaaaacatttgacagtgagaatgattttcaattattctatatataagatatatacatacctatactaataaattgaatgtagaaaaggagaaagaaagcatgagcgtattagatattattaaagccagaagaacgattggggctatgcaagacaaagacgtatcagaagatgctattaaccttatgttagaagccggcacttgggctcctaaccataaaaagacagagccttggaaatttcgagtgattacgggggattcacgcgttcgtttaggagacgaaatggaacgtattatgaaacaaaaaacggctcacctaagtgaagaagaagcgttgaaaaaaacaacaaaagctaaaaaaggcccgcttcgtgctcctgtcattattgctgtagcagtaagtccttctggtaaagtgcctgaaattgaagaaatctctgccgtagcggcaagtatacaaaatatgctattagtagcggaagaacaaggtttggctacaatttggagaaccggtgaaattgtctatcagtcagaactgaatgactttttatctctagaagacggagataagctcttaggcttaatttacgtcggtcatcctaacaaagaagcttcatcaaaacgtattccgtatcaagataaaacgatttggtatcgttaaaaggtttttcctgtgtttctataaataaaaggcagcagctcaacttatgagctgctgccttttattgtttttgaaaagtggcgttaagttgcgcttttataagcttacctgcaatggtttttttagtattttatggagaacttctctggtctccataactactagtcaaagcaaaacaggaattgtctgtgttcagtcttcttttcgaagaccaaaataataggtacatgccaaaccgaagataatgggcggcaagagaaagacaatcatttaacggtcaccttcctttcggatgattgaacgtctactttctgcatttgggtagcagcgttgacaaagaagatgccttttaactttgaatattccatcaatactaatagcaagctcattgcaagcagcggaacacacactactttggcaggaatgttgaaacaatagttaaggacggtgatgttggcaataaaatagttgtagaaatcagaatacccaaagaaataccacgccagtttcatcgcagaatcttttgttgaatcgaacacaaaatcgcctgttataaattgtcctgggtagattttggccattccataaataagaaacgtaatggccatggtccaccttagggtcgcaagaatgcttaaacgaaatttttcttttgttgataaacgcattgttttcctccatttgtatgcttagtccaaaaatcgcattttagtttcaggggtcggcaacatgcatgacgtttgttttccaaaccacttataccgattacgtgcaatgaaacgatagagtgggtttcggatgaatgcgggaacaactcggaaacatgccatcagttgaatgggtccccgaagccagcggacaatatggaggatcgccgtagactctgtgtaaagattcccattcataagaagaatgaccgattgaagtggtggacgctcatagttatgctgactcagcaaggtttccgcagtatcggattgaagcgatgtaaaacgaaacagagcacgcgaatctcgcttgatgacgaattgaatccattggttgcagagattgcaaataccatcaaatagaataataggatggtgtgatgggtttgggagcatgctttcttcctccttccttttttatgaatatttactaaaataagtataatagtttacatgttggactacaaggcataaaggtaaatatgggaataatctaaatgaattctaaaaaaagaagagttaactacgactcttcttttttgtgtttgctatacataattaaaattttttacctattttcttcaaaatgtaaaactattcctgttttgaaacgtactagatatagtagaaatttacaaaggtagatgcgataaaagagttaaccatctttgttactacaaaaaagaaacttacttcgaggtgaagacgtgaaaaatcaacatattttagaggtgaaagatttaactaaagtttataaaggagagggctatgaagttactgcactaaatgatatatcctttcagttaggggtaggtgaaatggttgctgttatgggaacaagcggttcaggaaaaagtacgcttttgaacattttaggagcacttgatgaaccaactagtggaacgattaaattaaaaggaatgctttcaaaagatatgttccaagaacctcaagcctcagcgtacagacgagataatatcggatttatctttcaatcattccacttattaaaagatttatctgtagaagaaaatatagctctgccgctagttttaaagggacttacatcggatgtaattgatttaaaagtaaatagcattgttgagctcttgggtttaacagcttggaaagaacaccgtcctgtacaactgtcaggtggacaacagcagcgcgtagctataggaagagcaattataactgaaccacctattattctggcagacgagcctacaggtaaccttgattttaatacttccgaagtcatactacacacactagtaactacaaaaaacgaacttagccaaagcatacttcttgttactcacgaccctaatgtagctacttatgcagatcgtgttctattctttcatgatggctctattgtcgatacatatatctgtagcggaaatagtgatttggatcatatactagagaagtttaagcttattacaaaagtcgagagtcctaagatatgaaaacactacaaggcttagcttttcgtttatttaagtccaataaatttatagtgttttcatctattgtaagtatagctatttctacgatgcttgtacttagtatggttttattctcttttaatgcgcaggacacattaaaaagtcaattaaaacaaacttacggtgagatggatttgtctgtagggtttgagatggatcaaggcaaaattttgacattgactttagtggaagaaattcaccaggataaaatggtagataaggtatcaaaagtatctattgctcatttgaatctaaataaactaaatacctctatctatacagtaggtgtcgaaaatgattatttagctaaaagtcggtatcacttttccaaaccgttgaataagaattctgtcgcaatgaacaaaggactagctaaagatttacatgcaaaagtaggagataaagttcttatagaaaacaaaacatatacattagcagaaacggtaaaagatttatccgctactggggtagctccagatatgctaatacttaatcaaaaaaacgtaaaaggctatattcaagcaaaagaaaaaagcagcgcagaagcaacttatttattaataaaggcacacaagaatgagagcgccttaaagttggccgatcgtataaaatcttataacaagaacttacgtattgatatagctgaacaagatgcaggcgtgcaaaataatttacaatccttacatacatttattattgttttatcggcattggtgttaattatcacgtctcttattctcatttcaaactttgagcttttgctttacaagatgaggaatcagttcgccattatgcgttcaataggagccagtgctaaacagattagcaagattatcatacttcaaagcaccgttataaacaccgtaggtacaggtgtaggatttttgctaaccttttgcagtcaaaggtacttatatagctggttaggaaaagtgtcagaaataccttcctttccatctgactttaacgtagatactgccattacccttacagttgtaatgtttgttattattcaattctttttactcgttccagcttatcgaagtacaaaagtattgcccctaaaaacaatgcagacgaacgagaaaattaactatggtttttccaagacaagagtagtagtttttaaggtactattagcactgtccttatttttagttataggaagccaagtatttcctacaagaggcacatacggacctgggatgttgctaattacagttattttagttttgcttgcctttatactaatctttcctatcatagtgactaaaggattaaaatggtttttgccatatggacaaaaaatatttggcaaagaattttatattgcggtaaaaaacctaattccccaagttaaaaaaaacacaatgattatcttaataatatgcggattaatgatcattactgtatttgggtcaattacattcagaaccatacaaattaatggactaacctacttaaaaaaagaatatgtaatgcctattattgtggaaactcgccttgatgattcaaaaatagatgtagaagaactaactagaaagactgaacaattacctaacgtaaaaagcgttagcaacatgagtaatcagggtttaggagagattttaaattcaaaaaaggttgcggatattcgttacaatgtggttgacttgaaaagattgcagaagcaaggacttctagagcacttctcgtatgtaaaaggaagtaataaagagaatagtataatagtgtctaaaaaatttgctgaaagtcatgatttaaaagtaggtcaggtactccatttaggtatgtatgttgaaaatcaagatgaatcaatggtagagggaaatataatacctaagggagattatgtggtaacagctatacctaatcaccttcttgacaataatgaagcatttttagattggaaaagcaacaagtttaaagatgtagatttttaccgcctatacatagatgctacggatgtaaaggccgctgtaaaagaaattgaaggtttaaaaagccagtatcccgaattaaaggtaagcagctatgatcaatctgttaaagaagcaaacgaaatgttttatcagcgctggggaatttttatagttgttattgccacgttggttgtttctaccatggtaggagtatttaattcattggcaaataatatttattcaaaacgaaaagaatttgctgttttacgcgcgatgggcatgacgccaaaatccattcgtaaagtcattctttcacaggtgaatttatatattacgattggagtaatatgtggaattgtaatgggacttttagtgacattaattctgctattaatggatccagggaagtttgttatagcttataaaacgattctttctgtagtagtatcaatgcttgtagttagcacttttttattctcatacgtaagtcgaaaaatatctggacaagatctttctatagagcttactaatgataataggtgacttctcatgtagatatattataatattaataagacccaatctctttgtagagtttgggtcttattagtttctatgttatttatttaacaacaacgttccctacatattgtgcgtagcctcatcagtttgaagttctagcacataaacataattcccttttttctttgggaacgtaaaagttctatcttgttcgtttatactaatatcttgcttcgcattactagtacttattgtataagaactaatgtcattaacaagaaaatcttcgctgtcaaaccttaaattccctggtgtttcaggggctacagctagctgttgctgctttttagctctatttataccattccttgtatttgtttcctttctgtactgttttccttcttcgcctcgccaatctacattagtttctttcagttcgacatccaaaacatcattggccgataatgtaaccgtagggggagagaagtcatattcttcgcctatacatcctgataatccaacgataataaacgtaaacagagataattttataaaccctttcatatataatgtcccccttagtgagttgtgactagtaaaaaaaattgctgcttaatttcttggaacaggggagaggtaataataaatattatattctttatcaatatgagggactacttcagtatcggtacgggtttcaattgtcatatttgattttgttggggtaccggcataaaaatcgtactttacaccttttggagtcgttatttcactagtgatatctgtatttccctttgattgtttgataatagctggattcccattaaaataccaacggattttttgatccttttgagttaatgtagctgttcctacacctacattcgatttttctttaattgtatagataacaatcttttcgttatctacatatttgctttcaccgataatatcttgtattcctgtagactctttttttgcattttcaaaggcttcatcttcactagaatagaattccacgtcttttttactgtgtacgttcgttgctgaacaagccgttagtatactggctgacagtagagatgcgagtaatgcagaatatacctttttcatacaaacctccattttattaatttctttaactttaatcttaatataaatagttaaaataatccatttatgtgatatagttgttcagtatgtaaaagttaaacaacaaagaaatggagtttcacaatgaagaattcaagaaagatagcagaaggagtagctgttctaattgttgcttttagtttaatgggatgtacctcaaaagaatcaattagcaaaaatacaaaacaagaagaagcccaaaaagaaatgaaaatagagttaacgtttctccaaaatgaatgtgatcgtcttattaataaagatgaggatgtagaaaaaacgtttcaaagttataaaaatgattttaatttgttatctgtgtccgttaacagtactgcaaaggttaataaaatgaataatgacgagttagaggtaagtatcaataaccttgaaaaagatgtggacaaactaaatggagaagaggctttaaaagcttatacaaaatacacttcccctaaaacaatatataaagtgacaatgatggacaatatgcgttctgttgtagatgccaccgatcgaaacgataaaagtatagacttcttctatgatcaccttcactcttcgcaaaaagaaactaacagggatataaaacctacggttaatgacataaagaatggaccggtatacaaactgagtatagtgcaagatgaattacaaaagcatcgagatgattttagtaaagaacagcttgaacagttggaaacagcaacgaaaggttttgattattctttggatgctcaattaaaaaccctcagatcatataaaaacattgttaacaatccgtacacaagtaataattttgactatgaagaagaagagaaatataacggagcccgcacgtaccttactgattttgaatcgaatttaggtgttgctaagcctgagtattaaaaacgtatgaaatggaggacaactatgaaaaagcataaaaaaatgttaattgcattttaatgttttttaagtctttcgatgttgtaattcatcctattcaagaaataaaaaagctgaggcctagtgtaaataggagctcagtttttttagtataaactaatatttatatcttctttcgtctgaccaaaatgaaatgtcctgcaaccgctaaagcaagagctaatgcaatattctttacagctaacaggataatccttggatacaactgcatatctatagagaatgacattacgttatatatcggaatgtccctagtcgtccaatacttgaccgctatatatgttaataaaataaatagcggaatagcaatgtttcgtgacaataccataaggaaaaatcctaagtaacagtacaacacagtttgaggagcataaataatagttaaattaaataatgatatgtaaggataagggtaccttaatgtaatagaaattagtaatgcaaaaaatgccgctagaaaaataagaaagaaagatgtcactctaataaggccgtaagacaaaatagatggcgaggagttaggtgttaactcagctgttttatctttatcaacagagtgatttaaaaataagtatacggaccaccaagcggccatgggacatacaacaaattctattattcttgatatatattgaaggctttctagatcaggggaaaagcacgtataaagtatggcaattaaaataattaaaaaaggtacatagaagtctatacccattgatttagcttcggacgagatgtttatttttttaacgaaggccattagcattttcctttctcttaattataagggcgtagttacagaaataaccaagtttaactggtagagttcttacgcatcaaattaagatgttactagtgtataattaaaacatatttagaaaaacaagtaaaataaaaatgtgataatttgttaatataaaaatcgaagaagattacgcgtttagtaaacctcccgtagctccaaaaacgtatccttcctataaagtttttggggggattaacaaaaagtgcttgtatatttaaatatccaagcactttttttataaattattttaactagaaagattaatcaggtggcagatacctaaaattcacaaaaaaagtgtaattattataaaatttagttaggtgtacttttaagtgatttctataggggggatagtatgagtttaaaagaaagagcaactaaagaatttaaagaaaagatagatagcgacgaagaaattagagaatctattttaacttactatgaatgtgaaagtggattttcgggacttgtaggtgtaccaaatggaaattctgtacctattcgaggtgttttagcttatacagaaaaaagcctacttttttacggagaagttttctctaatctgcctattgtattacatatcccattcaataaaatcagagaaataaaaacaggaaagcaaatccttacaattcaggacttataatagctttagcaaacatttttaattctgcattccaaggaagtatgcgttggattatggttgggggtggtttgttgatttttatatacaatttaatagtaacttttgatcaaaaacaaaatgaagcggttaatcaaaataaagaacagaactaactaaaagtctcgtggagaacaagttcattttaagcaaaatttaatgaagagggacatttcgaaaagaagtataaacatttacctagtagattgccaagaaattttagcttctagattctatataagtaaaagggttatcgagattggaaggaaaagattgaaataaaaattaaaaaaacaaagttattaaacatattaggacttctattaataatgagcgctacgctttatccagctggctacataaaatcactttatactttcatagcgctatatggtgtaggtatgactttaattttaactgtaggaattgtatctagaaaaaggcgttaattgttttagggagtttaaagtacttaaatttactttttttataggtgaggtaacgaagattctggagtgaatattttataggaaagagggaagaaatggacgttcaaaaggtagcaaacttatttttgatttttgtcttaattgcagcaggcatttccttggtaattggctttgttgttgctgtgagaagtacaaactataagaagggatatatatgtacttttatatccagtgtggtctttttactactgattgtgagctggtatgataaagcatcttcaaacatttttatggggacaataccttggattttaaatgttattgccgtcattattgtgttaccactgtacttgttagttgctcgctttatatttaaaaaggctacaaaaggacaaaaaggaacaaagaaaaagtttactggttaaattactttctttcatcgttttttctaatcttcacgattttaaataaatgaagatacacaaaaaaaatttttatcaatatcctgttagagaaagtgattgatatcattttctgtaaaggagagaacgtctatgattaaagttaaccaccaaattgtgaaaataagtgatctaaataatagttcgttaacgaaagaaaaagcagacattttaaaacagatggatgcctatagggaagtgtatgagtatgctacatttgaccagcttgattttgatgtatctgttaaattacaaattattgaatcatctgtactgctgcgcaaaagcggcgctaagtttgctacatttgcacgttctaggtgtaacgaaaagtattggaaacgaaccgataatggagggtttcagctactgcctaccgtttctcctcatcaggccatcgatgatattttttacaacggacacgaatacgcgtttgagtgcgcgacggctgttatcatcatcttttacaaagctgtattaaataatattggcaaagcaaactttaacaggctttttgctgatctttacttacacgattggcaatacgatgaagatcttgagctccatggttataaaggatctgactacttgcccggagactgtgcgtattttaaaaaccctgattataaccctgatactccccagtggaaaggtgaaaacactattgtattagatgaaactctatattttggtcatggaattggaatcacgacgcgagaaagaattattgaagtgttaaatttaaagagaaaagacgatgcaaagcaatcagcttatctgtcagatgaaattgtcaggctgcacacggctcacctcagttattttgcagttagatacgaacctgttgtttggtacgacagaaacagcgctattatttccactattgggtcgattacgtatgtagcttgattgatcaaagttttgatactttggtctttttgtgtaaaaaggaaagaattacatgaaggtaaatttgagaattcaaaaggattttatgtataaaagaagaatccatttaatacacaggtcttaaaaccaagtgatgagctgttgaaaaaacgagtgctcataccattattataggtagagttgtttttctgaaaaaataatgcatgtctttgacatatagcgacgtttaccttcaccaaaagtgagaaagagcctattcactttggcagatcgtcttttataagatgtttgtataaaatgaatgtatacatatttttatagaaaaaacatattgaggtaaagccgagatatggggggattcaattacatgaagaaagtcttaggggcgcttttgcttggcgcgacaattgttagtgcgtttattgcgtacagcatgtataccaatcattctgcaaagcaaacagccgcgatagaacaaaaacaagcagcgaaaaaagcagaaaaaaagactgagaaaaagactgagaaaaagaaaaaaccagtccttaaagtcgaagacctgacgtatcagttgaaagattcccgtacaggacaagtaatgaaagaattcaagccggttcattacaaggataaagacatatacgaccaagaaattaagcaattagcgtctgaactggcaaaagggatcgacacgcctatgcaaaacataaaaatggatgcaaatggatcgttaaccggcgggtccaaacaaattattttaaaagaagcagagcttgttaaaaatctgcagaacttaaatacgaaacaattggatgtgaaggttccgatttacgaaaccgctccaaatgtaacggcagcatctgctcaagggatcgctgatgtatcgttagcttcttattctacacgttttcgtccaagtgatacaagtcgaaacagaaatgttcagctatccgcagaagcgattaacaacgttgtattaggtcctggagattcattttcttataatcaaacagttggggagcgcacagcagaaagaggctatcagcctgctcctgaaatcatcaataaacagctggtgatgggaattggcggagggatctgccaaacatcttctacgctatttaatgctattgacggcgctggtcttcaagtgacagctaggtctcaccattcaaaacatgtaggttatgtacctgctggaagagatgcaaccgtatcgtggggaggacctgattttaagttcacaaacaacaaagattatcctgtcatcattaaagcctacgcaaatgtaaataccggtgttttaacggtagatgttcgtacttcacagcgttccatctaataaaaaaagacgtatccgttaggatacgtctttttttatttattatgcttattgttgctcccgttcacgaagttccacacgtcgaattttacctgaattagtttttggcaattcatcaataaattcaattacacgaggatacttataaggtgcagtaagagtttttacgtgattttgcagctctttaataaaccctgcatctgttgtttttacatgatcaacaagaacaacatacgcttttacaacatggccgcgatcagcatctgggctagctacaacggcacattctttcaccgctggatgcttaattaacgcatcttcaacttcaaatggtccaattgtatagccggaactgataataatatcatctccgcgtccttggaaccagtaatagttctcttcatctttagaagcgcggtcacctgttaaatagtagtttcctttatacgttttctcagtgcgctccatgtctttatagtagtgcttgaaaagagaagggaggtctctacgaacggcaatgtctccaacttctccaggcttacaaggttcgccatcttcattaatgatttctacaaacccttcaagcatcggtttacccattgaaccaatcttcgtttttacaccttttaaggtaccaatcaaaagggtattttccgtttgaccgtatccatcacgtacttggatattaaaatattttttaaacacattaatcacttcttcatttagcggctctccggcagatacagcgctatgaaggtgagataggtcaaaacgttccagctcatcaattttagccataaagcggtactctgttggcgtacagcacagtacgtttactttttcatcctgtaaaatttctaaaaactttttaggttcaaaacgtccgttatagataatgcctgttgcaccttgtccaagcacagataaaaacggagtccaaatccatttctgccaaccaggacctgctgttgcccagaccgtatcgccttttttaatatctaaccattcagcagctgcgatacgaaggtgagcataagcccatccatgagtatgaacaacgccttttggctgtcctgttgtaccagatgtataaggaaggaatgccgtatcatccttagttgttttagctgcttggaactgttctgatgcatcaaccgtaagtgactctaagcgcgtccatgacgtaacatcagcaccaaacgtaattttatgttgtagagaagtagggaagttttcaatcttatcgatctcattgcagaaaggatggtaagaaataatcgcttttgcttcagcgtgatgtaaacgatattggatatcttttgcgcgtaatagttctgaagaaggaattacaataatacctgcttttaagcatgctaagtaaatagcgtacgattcaataaggcgaggtgcaataactaaaacatgatcgccttttgttaatcctagctctgttaacccgtttgccactttattggcttttgctaacagctggttatatgtaatttcctcacgcgcaccgtcagcgttctgccactttaacgcaagctgatcggatgcatgtttttcaatttcctctgttaaattgtaatgttcacttggaactaaatcttttagttgaatcataaaaacgactccttatattatagatatcaatgattttttatcattactattattatattactaactattagtacttgctactaatttgttttgggttttagtaaaaagcaaaaaaagacccgcttaccttattaagacagcgggtataacgtatgttatttaaataagctccattttgtatgaataggtactagctcttcttcagactcgtcctcttcgtataaaccacgttcttttaaatactccacaaaatataagtctgcttccttacgttcatcataaggcttgatcgataaaacaaaccctactttatgctgatcttcattttcaacgcctgagagatacgcttttacattatgctgcaagaaaagctctttagcaggaataatcaagtctttaacgaacttcgacagcaattccacctcaaagtcgaaggtaaacttagcaattttttctaaatctgcaaataccacgccgataaagctcgtattatgtatttcgtagtctttcgttttttcatcccactctatatgtccgatttcctttaagtaattaataaaatacccaatgccttcattgcggccaaaaggctgtttagaaaggactaaaccaatcttcttgtacttaggaagatacacgcatgagatagcggcttcaactttatgctgttgaaataagtgcgttgccccttgaagcaaggcatctaagacatgatgggtaattttcatttgcttacgaggaaagtgatattcattgcgtgctaattcatctgtatcagcaaacgttgctccaataaagcctgtattggatagggtaggagggagcttctttctttttctttttcgtaccgtcattcaaaaacactccttgtgatcatcaatacgataaaaataaaacgaacatacgttcttatctaatgatacaaaaaatgtgtcgaaaagtaaagaaaagttaacggagaatttgaaattttataataaaagtaactaagatttgtaaaacgtagcggttagtagaagttaaagaggagagggggagagcaaaaaaataaaaggctgcagatgaaaagcatccacagccttttatatattcattaacgagcttctgttaaagctaccatatcttcatcatctaaatcgatatctacgtgacaatccattgtatgaattgttttatcttcatgatttccataataaattgtaatgttcatgagtatcgctcctttaaaactggataatgacatccaatttataccgtcatctatttgtttaatattatacccgatgaaaaaggaaactacaactaaaatcactaaaaagctgataagaaaggggtttttagtgattttaataaggtatcagatagaataaaaatactattttatgtattttattacagaaaatacgaggttttaacttttgcaaatgaataaaaatccatttaatgcaaacatatctactgaatgaaaaatatacgttctgtagaaaataaatccttaaaagattacacacaaacagattttatcaatttgcaaagagtttattgagaatacgatgagaaaaaataaatgagtataaaatctaaatcctacaagtaaactcatttatttttcaaaatctataaatataaatcgaactgatcaaacttaaaaacaatctggtgaaatcaatatgcattctataaaatcatatccgcatttgttctaattgaacaaacattgctgataattagtttagtgagttaaatcatataaacacaaaccctatctcattttcgaattccgtctcactatcataagtatactttttaaatgagacagaattcacgttttatctattggttcctagaatatatattatgtaaactagaaaaagaaataaaatcattgaggtctcccttactcttagatctttggaatacatatcacctattgcgttgtcttggttactcgtttgctttatggctttatcaagacttcctataagaaaataatcactcacttgatttggatgacctttttaagtgtacgtcgttttgtgcagaattaagtaattaatcatcgagttaagcctagaacgttacaacgccgtatatcaagctacttagtcaatatcgtttagaagaaaattatatgaagtcagacttcactgctgacatccaagcgccaaaatcagacaaaaagcttcctgtttatatgtccctccaagagcttcaaaaacttttccgctacctagaagctgataagcgccccctagccttttgaaataattcattgttattctcaacgtttggaatttattagttcttcctctttcgccgctcttcccttataataacctgttagagagaggagcatagaatatggcagatgtaaaacaatttatcttttttgattttgaaatgctgtgttcaaacaaaggaatgccgtttgaagatatggaagcaattcggctcggcgcggtgaagtacaatatcgagacagaagacattgagttttttgaccgttatattcaacctacaaaacgggtgtccttaagccgcttttgcacagagttaaccggcattaaagatactgatttagtcggtgcaagtaattttaaaaatgtttttgaagactttttaacctggattggtggaattaaaaaatcccgttttttctcttggtctaccagcgatttatctcgtttaaaaatagatgcggtaaagcacgaaatctctcttgctactataaagaaaatagaacagcgttatgttgattttcaagcaatttttacaaagcgtgtttctaaaaataacgtatcagtagaaaatgggttagctttatataatttgcagtttgagggtaaaaagcacaatccgatgtatgatgcgtataacactcttcgtatatacctaagctttttgaacgaaccagtgcagtctgatttcattatgataaagcaatttattctggaagaagtaccgcagaacattaaagaaataaatgcagtgcttagaaaggcaatacaaaaagacctccacatatttgcggaagaattaaatgaaatgtataaaatgaaagatgcggtaaaaattataaagagaactcaaagaatcgttaaaaaatacgaaaatattcttatcaatcgctctggtttgttttcggaggaaaatagtttttatgtcggtcttttagtggatttttatcataatttgctgctttgttataatgaacatctcgaatactcatcgaaaattatcattttagatgaaagcactctatatcctttaaaccagctttctttaaagagaggatgaaaatccgttctctttggtacataatttagctctttccttatccccttcattccataaactctcaagaacagaatcatcatattcagaacctaagtattctaaataaccatgatcttgatattcaattgctaaaaatagtaaatcgatattggaagtagtgtctgttccaaccgttactagtaaagcaccttttccagatacgttcaccttataaaaatctatatcaagagtatcttcgaattgcccaaatgttactctctcgtttagcagtgtatctactattttgaaatcattattaggctcactttcatacattggctgaccactgctgcccttaatacttgtacttgatgcattaaattttgatgtttagttttataatgcactttctctttacaaaagtgaatgaactataacaggaattaaaacctcaaaagtataatagctgcttttgaggttttgtatcgctctttttatgtttaattaacagcttattttattagtaaccgtctaccgtaacatcagtaattgccccatcactaggacttacttgataccaaccttgtgtagctgtatgttcttctcctgtttcttcattatccacaacattttcataaacatggataatatagtttcctgaatcgtcaacgtgatcatatgctacaaggagaggtgaatcttcagatatgccttgctgatcacgaactagctggatagcttgctcttgggaaactgtttgttcggctggttcctcttcctcaagggcttctgtatcttcttcttgctctgattccgattctgtttgcgcctcatcttctaaaaaagcttcagcctcagcttcttcctcatccgattttgcctgagcttcctcttcctcctgtttcttcttctcttcttctgctaaacgttcttcctccgctttgcgatctgcttctgcctgagctacagcttctgcatcagctttggcctgcgcctcttcttctttttgtcggtcttcttctagctgcgcatagtaatcatctaattccttttccatttgctgctgttcaaggtctgataattgcttttgttgttcttgtatttggttttgaagcaaagcaatttgttcttctgaagcattatcaacaaaattgatgttttctacataatcaccactggcgtcaaaattaacttccatcatacaaaaaacattttgctcttgattaatgccatagtaaatatactgattgtcacctacttggatatactgataaccattcattacgtttaataagtaatcgcgatcagcttctttagaattaactgcttttttaattgtggatgcttttgtttgtaatgtattcggcgatgattcttttacagccgttttattgccattttctttcgtatgaaccgctgttgatttctctgtaggctcttctttttgcgatacagtttcactggtctcatcgctacaggctgctagcaatatagctaacagtggaataccaaaagcaacttttaacattttcatagactattatccgctttttttatctttttttaggttttaagcaattctaaagaactataaaaaccttaggggttattataccaaaattaagaaaatataagaatgttttcttgtgttgtttatggaattttttgaaaaaaatatctttttatgcataaaaaaacacaaagccatgcaattttttataacacggttttgtgttttcgtaacagagttaatgatgaaatccattgtcgtatttcgtgtctttaagaacaggtctatccaacgagttaagaaattcaacggcttgtttgaaattaaccataaataaatgagcaaggtcccttgaaaatccatttctaacgacaatgcgcatgattgttatttcttccatgtctgcaggcagcggataagcaggaacttgccatccatacgtacgcagttgtctagacaaatcataaagcgtccagtttggcgtatatccttctttcagtttccaagcaagaaccgggatatctgaaccatcagcaagaatttcgaatgcttccatttctccaatttctttgctgagaaacagcgcgttttcttgagaggttttttgcacagcataatagccgtctttacctaaacgcaagaaattgtagtactgtaaaagaacttgtgctcctggtctagagaagttgagcgcgaaagttggcatgttgcctcctaaataagaaacgcggaaaataagatcttcaggcaagtcctctttttctctccaaatcacccatcccaagccaggataaactaaaccatacttgtgtcctgacacgttaatggactttactcgaggcaagcggaaatcccagatgaggtctggttgaagaaatggagcgataaaacctccagaagcggcatctacatgaataggaatatccaaccctgttttttcctgtaactcatctaatacttttgcgatagcagcaattggttcgtaaactcctgtatacgtcactccaagaatcggtacgacgccaattgtattttcgtcaaccgcattaatgacgccttctgcatctaaataaggatgatctggattaatgttcacataacgaggttctacgtcccaatagtttgcgaacttctcccacaccacttgaacggatgaactaaatacaatgttcgggcggtccgttgatagccctttacttttacgcagtttctgccagcgtctttttaaagccagtccgccaagcatacatgcttcagatgaacctgtagtagaaacgcccatcgttgtatcaggattaggtgaattccacaaatccgctaaaatacgtacacatctctcttcaatagccgctgtctgcggatactcgtctttatcgatcatatttttatcaaaagattctccgtacaaacgctttgcatcaggctccatccacgtagtaacaaacgtagctaaatttaaacgggcatttccgtctaaagcaatttcatcatgaatgatttgataagctgtttctggaagcataccttgatcactgatacgcagccttggaatcgtcacttctccttgtcgagaaaaaagtggattaacaggaaattcatcaggtaaatttttttgttcacgatgcggatgccattgaggcataaagtatcatctccttatgtatatctaacaaactgctttacgttcacctggtgttataacaagcaggtctcctttacacattatgagctttgaagactattttcattctttccattatccgcagcacataagggtgatctttatttagtgatactcataaaaatctgcttggcacaactcaaagggtggaaaatatggtaatatattctaaaggaggtttttaaatggagaaacaagggattatcttgcaagacaagtttttcgagttaggtgaatctcctatttataatgaatcacaagacgtcattggaaatgtcgcatataagttatctattgctaataaatttgagattttaaaggacgaagaaattatatttacaggtaaatctaaaatgtttgcccttatgccgaagctgattatttctgatcaccacggaaatgaagttggcatgattcagcgaaaatttacttttttaaaaaagaagtatctttatatcagaaacgatggcgatacatatgaaattacggggaatataacagatcgcaaattcgacgttttgcgttccggcgttcctgttattcaagtccgcacactctcttcttttctgtcattacgtccccacacgtttgctttagaatttctcgaacctgatctcgataagtgggaaggaattgcggttatacaaggcgtaaggatgatggtgaaagacgaaaacagcagtacagctactgctccggctcaatagtggttatatgatataaaaaaacgaacaaactttatattgaagtttgttcgtttttttaattaagggccaaatactaatgtaccgataacatggtagctaattggtacaagaaacaagatgatatttaaaataatcgcccatagacagagcttgtctttttttataaaaaaaccaataattgcaggaacaatcatgagcggaactaaaaagataggtgcgataataggcagtccttgaagcttttcggccgcaataagccctgtgaaaaagttaaggatcaataaagtattaataatgacatataaaagtgaaattcctccaagaaccccgcctattatcccgcttttagttgttttaacagtagcatccacgtttctatcacctcttttttagaaatataagtaaactatactataatatggattttattgtaaaggtatagagaaaaaaactgataaaaacccattacgaaaaagcactgtagcaatcgctacagtgctttttataaacagtgcattttttcttctgcttctttccaaggaaccgtatagccctgtccttttgcgcaaaagacggacgatgaactgtattcgggatccgcctctttattgtagcggatttgttcaatcacttctgcttcattatgacagcgttcatgccctccgaataatagagacatcgctccttttccatgcgtaaaagatgctagcgtcgaaccgtaggtcataaaagtagcaacaggagcttttcctgtaataatcgctttattttcggttgttacaggagaatcaaagcgaccgtgtgcactttgaacatcagctaatactcttcccatttgatcaatatctactttaattttaaagtcataatacggttctagcacaatattttctgctttttctaacccttgtcgcagtgcacggtacgttgcttctctaaaatctcctccgcttgtatgcttgttgtgagctcgtccagtgcataatgtcacttttatatcagtaataggtgaacctgtcagcaaaccatgatgcggcttttcaaatatatgctgacggactagattttgataccccacggataaatcctcggcgtgacaagcattttcaaaagtaattccgctgtttcgttccgctgcttctattttcaaatgaacttctgcatagtgtttcaacggttcaaaatgcccgtagcccatcactgtattttgaatggattctttgtacaaaatttctggttcttcaaactgtacatttatattaaaacgttcttttatcagtttttcgaggacttcaagctgaattgctcccatcacatgaatatgaagctcttgagtcctttcttcccacgttacatgtaaagaagggtcttcagcatctaataattgaaaaattttaattccttcttttggatgaacagaaggctcaaaaacaacttttgattttaacgtaggcaaaagttcgtaggagcggctttcttttaatgttccaagaccgtctccaatcgatgctgaagacaaccctgtaaccgcaaaaagttcgcctgctgaaccttcatttacgtttttaaatgtgcttccgttataagcacgaatttgagtgattttttcttcgtatagatctcctttttttcataagccacttcatcacgcacttgtaacttcccgctcagagctttgataaacgtgatgcgcatgccattttcatcgtgccgaattttatatacacgacctgaaaatgcttcttcctgcgagtagcgagtttctgttaacaaatcaaccttctctaaaaattctttaataccgaagtcttgtaaagctgaaccactggcacacgggaaaagctgattggtttgaataagcttttgcatagccgctctccaataagcttgagcattcttgccttccataaatgcatctaaaagctcttcatctttttcagctataaattcaataagttcctcacttaacgagccatctataagctctgacgttatgtcaaaaacatcggaggttaagttatatttaatatcgtttataacacgttcaggatctgctcctacacgatcgattttattgataaaaaagaatacgggcacacgatgtttttgaagcagctgccaaacagtttctgtatggccttcgactccttctactgcacttaagataacaatcgcatagtccatcacttgaatagaacgttccatttcaggtgaaaaatcgacgtggcccggtgtatcaattaaatagtaagtagaaccgttatatgaaaaagttccttgatcggcaaataccgtaatccctcgttctttttcaatcgtatgggtatcaagaaaggaatctttgtggtcgactcttcctcgttgtttaatacttttggtatgataaagaagctgttcggaaaacgttgtctttcctgcatcgacatgcgctacgataccgatcgttttgttagattgtttcattgttaaataccaccttactgctgtatgtatagctgttactttctattttataataatcgcaagaaaaagtggacgacaaaggcctagaactgctcacatcaaaaaagaatgcgtgattaaacatcgcattccctttttgtacggcgtttagtatcttttttgccttttgctataaaaatagctgctataaggcacccaattccagctaaatgcaggatgttattacccgtcgcgcctagactgttaatagtcaacccaactaaaatgctgccaaatataatcaataaaacagcaaacatgaacttcaatttcttcactctccgttagtaagttattaaatatgatttgcatacggatcatataaaccagtaagtaatactagacttgctgataaaatcaatgttcctacgattaaccaactgttgctacataccttttttccctttttgcgtaaaaacattcctaatataagaaatagtagtgcgacagatagtagaatcaatcctataccaatattcaatatttctttctctcccttgtacatgtattcattactatctagttaaccataatattattatgaaaataaaaagcgaacttgaacttttaccgaacttaattgttttatatgttatcatacataaattgttaaaaatacatttttcacctttctctattagaaaaaacagcctcttgactaagagactgtttttaatgacgactgataaaacctgattaagaagctttttttaattgttctttttgtttctgttgataagaagaaaaataaataaggcctacaaatacagctcctcctatcatatttccgataaaggtaggaacaatatttgtcataaaatcaatccatgtaaagtgacctgcaaaaatagcggcgggaataataaacatattggctacaacgtgctgcaagccaatcgcaacaaatgccatgatcggaaaccaaataccaagaattttccccgtaacatcgtcagcgccgtatgaaagccaaatagctaaacatacaagccagttacagcccacagcagaaataagcgttttaaaaaatgagtcatcaattttagcttgagcaattgctaccgttttatctaaaaaaggccccgtttctgttaacccgacaatatgtccaaagaaatacgcaataaatacggctcctaaaaagttagcaagcgtgacccaaaaccagttatgaaacaagtgacgaagtgaaatttttcttgcatacagagcaatggaaacagacatcatattccctgtaataagctcagctcccccgagcacaaccagcataagacctacaggaaagacgacccctcctaaaagattcgataaacttccccattcaactggtaaattaccaatgacgcgcacatctagtaaaaaaccaagcgcaataaaagctcctcctaaaaacccaagcataagaatagaagaaagggacagcttagtttttgaaacccccgcttctaaagcgatgtttaacattttatccggcttgtgaaatgccataaaactcctccttaactaaaaaaggcagcactcaaaaacaccttttacacaaggtttttgaatgctgcctaataatcctgcactttctttacagtatatcagtcatcattatctataataaaatcaaataaaaaacaagcagatcctacttctctttcatttaattaaattatgtattttacgttgttttattgaatattggtttcaaacacaaacacagaaacagcgatatcttcttccactttgatatcagaaaataagtactccagcttagctcctaacaagtcttcaagcccttctggaggagatgcagcataaaggttttgaataagcttcgttcttgccatatgtaccgtctctttaccttcggttgttctcgcgataaattgttcagctggcgttaagttgccgtacaaagttgaaatagccatattttgaacaaatacagtatgaattcgttctggaccttttccaaaaagttttttgcgcagctttcggataatatcattaaaatcatgtattttcttagacactggtgtatgcctccgcttatctcgagtatgtctcccctgctcattcaagttttcaactaagaataagttacattatacatgacgacgtttacattgtatacaatgtatctgttttatccccgttaatccaaacaatcgcaaaaccattacaaaatgataaaaaaaatcctccacttattaaagtgaaggattacctttatatctctacttaaaggttacaaatggattctcagttattaaagaaataactaagaactttgacaaaatagtatgtcaaaatagtcaagtggtatgtttgtaccagtagttaatgctatcacgttaaagtcatggaatccaattagtttactttcataatactttatttaatttaaatattcttttttgataggaaacccttaatcttcatcacgatctgctctaaattcatcatcagataatgaatttaattggtggctaagcttttcgtagttatcttgtttctggttttgttgtatatcattagatataggagcttcactagaaacagtagacttttttctagtctcttcgcctccgctaactccaaacccaacattgttatctgtcatgggattcacctctttaactgttattatggagaattgctctaaaaaaataacaggaaacaaaagggattcccacttagctaatagcggtccaagcttccttacttacaccaaatcgtatttatataaggaaatgacctgctctaaccccataggcaataccaacaaaaaaacttgctatacctagtgtttgacttttacatacatactttatagttaagcctggaatcagaccccatataatgatgaaaatagcgaacgatactataatagaagaccatgcaccttgccctgatatacttataccttgcataaacgtttctcctttcagtccttatatcgggagaacataaattttttatagtatcttataatacgaactaaaaaattcaagtgacctgtccatatatgcttttacagcgaatggtggcgttcaagctcgattgtttttggtttttgccatattaatacccctgccgctacatacataaacgaagtgatgtaaaaaaggctgccgattgtaagaaaatcaatgatataccctgttgcaattacggctaaagctgcccatatagaggtccataaatgatagtgtcctacttgttttcccctatgagcacgatctgtctgcctagataacgctattttttctgctgttttttgaagagctccaagtagccccattataatttgaactatatacacctgcgtgatcgttgttaaaacaggaataataatcataacaactgccatcccaaacgtatataaaagaagcaagcgcttttctcctaccctatcactccatgaaccgattaaagggtgactcaaagctgcggttaaagcgaaaattccgtaagctaagccaaattgtgaataactatcgccaagatttcgaagcagcaaaaggtaaaaaggaaaaacaatactgcttgcggtaatcatcaggctttgtgagtgtaagagttgtttgtacgtcattttccatactccttataaaataaattaacgaacgtttcgttccaatcatattttcttttcaaattaaaaaaggcggttgtatgagggtaagcctcttttaattgcttcttgcttgggtagccgtaataaggcaagtaatagcttccctgatgctgcagcgtcacatccaccatttttctgacaactctttgtgtatcagccatcccttgatggtcttttttctggttaataagtaaaacgagagcaaacatatcgtcttttgcataagacatgactgctttattgtctttttctacatagcgaacagtaatgttcagtaaatttaatttctctgttgctaacacttcgcgtaaatcatcgatgtaagaagcaaattcatcaaccggaacgaagtattcctgtaaaacttccgtccggctaacactttcgtattccataaaatcactttcagaacgcataacattatttcttgtttcaagccggccattttgtcttaagaaataagccttttgtgtttcccacagcatatcttttccccagtcactgtaacgagacagccctagcataaatttaggaagcgccactattttctctgtcttgagcggttcgtttacagtagaagtattttgagaagataaacggtagtttgtgacgtacatatctgttagcaattgattaggagaaacagaaatacgcgccatatgcatacgaacgtcagagttatgctgtacgtagtttttaaaatacgctgtatactgcctataatctaagcgaataatttcatcttcataccattcatcgtccgtcaaacgaagcgtcacatctaaaatgaccccaaataacccgtagcctccgtttactaaagaaaacagctcagggtgttttgtccggctaatttcgataatagacccgtcggcctgcaggagacgcatagattttatcgtatccattaaagaaccgtatcgaatatctctgccgtgtacgttcacgctgatagaacctccaacggtaaaaatattttgtgattgcataacctgaagagcaagaccgtctttatgtatatattgctgaatatcattccacgttgtcccgctttgaaccgtaatttctttttgacggggcttgtaatctataattttattgtactgcttcatatcaagtaaaatagcatttggatagtacgtctgccctccttgactgtgctgcatgcctgcaatcgctattttttcatgatgctgtgaagcggttttcacccaatcttttatctgtttttcagttgttccacgctttatttctttgacttttgtaggaagaagccgagcaacatcccccgttacaggacggctttgctgctgtttataaatatgataggaggcatatgaacctactagataaaaagataaaaaagttcctaacaacacgtttttcttcatcacaaactgtaagctcctttctttatttctgtgaaattataccatattaaaagtgaaataacactaataaagtgtaattttacactttattagtgttattttgagaaagtatatgaagaaaacttgtaatttaatgtatcttaaccttattgaaacaaaaaaagaaaagacctagcgtcttttctttttttgtttctttatttttcagcttcgtatgcaactaaagctactctttttcctaacgtttgttgaaactgctcttctagctgtttaagcttcgcatgcatatcatcgttaattgaagctggctcaaaggtcatttttgtttgctccatcatactgtcacctctttcatgtgtgtatgttctactttttccaatataaaagaggtctatgacgatttgacgaaagtttacaaattaaatttgctaatgagcgctgttaattgttctgccatttgagacagagattgtgcggaaacagcaatttcctccattgaagccagctgttcttcagttgatgcggccacttcttcagatgtagctgcatttcctttagcaaggatcgccatttcacctgctgtacgagccacttcttcaaccgctgctgaaatttgctgagcagtcgcagccacttcttctacttgcggagtcgtttcattcatgctgcttagaatttgttcgaatttttgaatagccgtttgtgaaattgttcgtccttcttcaactttgtttgtaacttgctccattgtatgtacagattcctgagtatcttgttgaatagcttgaataagctcagaaatttgagacgcggacacttgggattgttctgccagctttctcacttccgctgctacaacggaaaatccttttccctgttctccagctcgtgccgcttcgattgcagcatttaaggctagtaaatttgtttgagcagcaatgccgctgattacttctaaaatggttccaacttcttttgaacgttgaaacaaagtacgaattgttgtattagacaggtcgacggattgataaatggattccatttgttcgaccgtttctctcacggcttttccgccttctacagcttcagacgttgtgtggtttgatagcttagaaacaatttctgtacgctgagcaatggtagaaactccttgcacaatctcatctaaagaagctgcattttggtcaataacagccgtttgtttttctgcactagaagccacttcttgtattgcaaccgatacttgttcagtcgcagcgctcgtttgctgtgaactggccgttagctcttctgaagaagcagccacttgttctgcactcgtttcaacattttgaattaatgtgcgaaggttgttttgcatctgactaaaagcataccctaactcaccgatttcatcctttgaattgacggtaatcgctgttgtcaaatctccttcactaacgcttagagcctgattcttaagctgtttaagcggtttaataatcgattgcaacaccacgaaaatggtaagactcccgattatcagacaagctaaaataataaatagtgttttgtaaaaaataggctgtgctgcttcactcacttctgatgaatacatagtgcctgcaactttccagttcgttgttttatttgttgtaaagaccatctttttttcatcgccgttaaaagtgtattcaaaggatccggagctctttacataaagcttgtcaaaaagagaatctgttgcttttgtacctgctttttccgtagggtgaacaatatattttctttctccatctaaaagaaatggatatcctttttctccgatttttactttgctgacagctttattgatgcggcttatatctaaattcaaagcaataacccctgtgccatccgccgttgtttttgctacagtaataacggtctgacctgtagaggctgatggataaggttcagtgacaactgtttttcctttgttttgcatggctaacttgtaccaatctcgttttctgggatcatagcctgcttgtgtcacttttttaggcgcttgaataaacttcccctgctgatttcctgtaaaaatgctgacggcttctggatgaagcgaagcatataagttaaaatctttgcttaaagtagccatatctttttcattgtagcgctcgttgtttaccactgatgcaaaaaactctacatcatgaatttttggtccaatggtatcgtcaatcactgaattaatggactgtacattttgctgtgctgtgttaataatttggttttcaatttcatgtttcgctgttatgtaagctgatacacctatcgtaacagatggcactaataagatcgctgcaaatgctagcaccagctttgtcttaaagttattaagggaccttttttttcttgctctctccatgctatgtagcctctctctccgtagttaaaagtgatcgtgcactttctttctatcggcaagacttcatattcgtttagtcatcgagtgtatacataattaacaatgggtgtgaaaagataagagtacgataaaaaaagtaggtgaatttaatggaagaaagtaaaaacagcaagtctttttcaatgtttgaaacagaaaaggttcagcgcggggaagaaaaagatatttttaatatctataaagaaggagtaaaaattgcagaagtaagaggaacggatcctcaaactcagcaggttattccaatgcatgacttaaacgactatgaagaaaataagcttcacgaatatatcgctcatttagaccacacaacgtaaacggactaaaacaagagccctctcttgttttagtctttagaatcataaaaaatatgttcaaaacgcagcgtgtttttttgtatgtacagaaccccaaacgaaaattgcttttcacgccgcttgtcagtagcggaacctggattaaacaacgtaatatcaccaatttgtttatgaacaggaatgtgagaatgaccaaaaattactgcgtcgacttgttgatgttcaaatgtgataagcgcacgtttttcagttgtttttcctttgccatgaccgtggactacgccaatcgtaacaccgtcaaacggaagaagtaatgaagttggaagtacttgttgaagctcttcactgtctacatttccaatcacgccgtgtacaggagcaaacacgcgcaggtcattgtagacatctatcgtttgaaagtctcccgtatgaataatcgcatcagctgttttcagttcggctaggagtcttttcggaagatgtttcgctctttttggaatatgagtatcacctaaaataacaatcttcattcacgatacgctcctttttcattcaatatggtgtagtgtatcgtattaagttgagatgaagcaactttatacgagcgtcaggcaaaaaatttctctttttcgtttaagtttgcgaaaatacgttacataccaagttacagaatggagttttcaaaatggaagtaaaaattaatcgaaacgcagcaaaagtgttaaaaaatgccttggctagcccagaaggtcaaggaaaaatgattcgtgtatatgtaactatagatcacggtgatcacgcgcattatgattggaaattcgatacgccgactgaacatgatgaaatcgtaaaaacagataaagatatcgatatcgttttagataaacgcgagaaatttttagaaggcgtatggattcaatatttccacgttccagagcctgagtttgtgattagcagccttcaccacgcgcatcaccatcattaatacaaaaaacacaccttgttttataggtgtgttttttcgtttgtaggacaagcaaaaattttattgatgagaagaagagataaaattttgttgaagcaataaaaatgagctatagtggaattatggatgaaagaaaagaggttagcgtatgaaagtaagtgtgttagcaaggtctattttagttgttattttatataatttattcgttttgtacatcggatggaacgcttgggtgtggcttcacacaatgtttgaagtagaaaacaaatggattcttacgttgatcgttgtcttttttgcttattcctttatcatcagtcgtgcgtttcaacaagtgagcatatttaaaattgtgggatcgtactggttaggatttattcaatattcggttcttttgcttcctataagtaatctagccgtatatattcttactcttctaggcgcttcgctttctacagctatcgattcaatcggatttttcataattgtcgcttttttattcatttttgcttacggtacgtataatgcttacagtcctgtggtaagaaaatacacgatttcgcttgctaaaaagacgaatcggaaaaaccttcgcattgctgtagcatctgatatgcactttggcacattgtcgggcaaaaaacacttgcagcggttaatcactcatgtacaaaagatacagccggatcttattttacttcctggagatattattgacgatgatccccacgtattctttaaaaaagaaatggattatatgatgaaacagctcagagcgcctttaggcacatatggaattttgggaaaccatgagtattatggcgggaagattcctcagtttgtggaaagaatgaaagaaataaacattcctattttaatggatgaagtggtaaacataggtgatagcttgtatttaataggaagaaaagacaagacggataaaaaccgagacagctttttcgatttagcgagtgaaacggatcgttctctacctgtcattgcaatggatcatcagccgctttctttaaaagaagcggaacaagcaggcgtagatttacttctatgcggtcatactcacagagggcaaatggcacctaatcatttaatcacaaagcggttatttgaaattgattggggctacaagcaaactaatcaactgcataccattgtctcttcgggatttggcttttggggtcctccgcttcgaatcgggagccgatcagaaattattcaaattgatatttcgtttacaaaatagagaaagccctagggctttctctattttaatgtacgcagcagattgggaagctctgcataaatggcgactacttcatctactttcattcgaacgagcccgcttgaagacggggcaacaaaatccattattcctgataccatcgattcttcttgtttaccccactttacttgcttgcgcccgctgtactgctgatagacaccttttccaacaaaacaaacgattttaggcgtatatgtagctatttttttctttaaaatttctctgccttctgcatattcttcttttgtaatctcatcagctgcctttgtaggacgctctacaatattggttaaaccgtatcctagctgtaacagcgagtgatcttcctcggaatggtatttacgctctgttaaacctgctttatgaagaatcgtccaaaaacgattagttgggttcgcaaaatgatgacccgtttcgccggaacggatgcttggattaaaaccaacaaataaaatatctaagtcgggctgtatatgatcaaaaatagagttcatagtcatacgctccttacaatgtaaaaagaaaacatccaatttgaatgttttctttttactataccctattaaatacgaactacgcgtccgttgaatttttgtttccagtagccgctgctcatgtttgcaattgcaacacctgttgagctttgagcaccgatgaacttgccgcctcctacataaataccaacgtggccgtcttttttatatgtatcgaagaaaacaagatcgccaggctgcatttgactggaagacacctgcgttccagcatgctttaacgtttctgtgcttacagatccaagaggtccaaggttaacacctacttgagaatatgcccagtgtacaaatgacgagcagtcaaataaaccgtggttaatatcagattgacttcgtcctccgccaaatacgtacgcagagtttccaatccagcggtttcctaccgttacaacattgctagcttttggagccggagcgcttgtaggtgcaacatcattgctgcttgcttttggtgctgctttaggagaaggcgaatcggctttttctgatggtgccgccgctgctttttgggcttgttcggctgctttcttagctgcctctttagccgcttgttcagctgcttttcttgctgcttcttccgccgctttttgatctttaatattttgttcaagcgtagactgttcattcgcaagagagctgtcttttgattgtagagaagcttttagttcttcattttttgcttctttatcttttagttcttttgccaacgcatctttttgtttcttttgagctgccagctggacagtcatttcatccagttctgccttcatatcttctaagctagcaagcttagatttaacatctgcttgttttgtttttagttcgtcttgcatatttttagtttctgttaaaataccgcggtctgcatctacaatagtcgaaacagctagcgcgcggtctacaaaatcaccaaaacttgaagaaccaagtaaaacttgtaaatactctacgttaccgccgctttcttgcatggaacgtgcacgatcttttaaaatatcatttcgcttttcaagtttttcttgaagcagcttaatttctttttcaagctggtctacttgtttagacgtttctttaatatccgcttctgttttttgggcttttttattattttcttcttctgctaatgttaatcgctcaagctgtgctttcatttgatcttgttctgcttgaaggcgtgttaattcatcagaagctgctttgatgttagattgcacatcttggcgctgattttgaatttgagatttttgtgattccatatcctgaatggtagaggcatatgctggggttgataaaactcctcctaaacctaataaaaccgttgtattaagtaaaagcattttctttttcaatatgaattcctccgctttctcgctctgttaaactagtaatttctaattatgtatcaatatgtataaaagtcttacaatttatgtaaagttcactgtatttgtcgataaatagctaaatatgctaatgaaaatctacgaaaattataccacgataagcgttcaaaaaaagaataacaatattacaattgtatttcagtaatgtaacatttaacgcttgtgtacatattcacttcttacctgcaaaaatatacctttatttacccatcaaaataaacaatctactagactttacatagcactgtttttaacctctggaagtaggtgattaccatttttaaagctggacgaatgtaagttatgcctaaagtgaacgtaacaactctttaacatattcgtctatttttaccctttatcttccatttttacaatatttgaaaatgatttcctggaataataataaatttatttctattcgatatttgaagaagttcaaaaagagggcaataggcaatttcaaaacaatattcgacaagatatgaatgaagtcatacaaaaaaccttctcgctgtgaggcgagaaggttttttgttaatcacgctgctgataatagtgttctaaagctacaattgcgcttcccattcgctcttgatcaggaataacaatacgatctactccttcttcttttaaagcagcagcggttactttcccaacggccacagctactacagagctttcgaagagttctcgaattcgatcagcttgcccatattctctcgcaaacgaaaataaaaatcgggcttggggagcacttgtgaaattaactgcatcgattttcccgcttattagttcgtttataagctgttccatgacttctgcttttggaggaatatgctgatacggtaaaatctctttaaattgggctttttgattcgaaagaaagtcaatcaatcttggtgcaggatctccgtgaagctgaagcgctacatgcttttcttcaaaagaaaacgaatgaagcgctctgacgagtcctgcggtacttccatcatcatctcgaacggttggagtaacgcctagcttttttaacatatttacggttttatacccgcgtgcagcaatattagctgcttgtaaagaagaaaggaattcgtcggccagccctagcttatctgccgttttataaagaatttctgtaccgacgcctgtcgtgaaaataaaccaatcataatttccttttaccagttctttaatatctgcctctaagtgtgtgtcatctaaaagaatggttccttgcgcaggtcgtacaagcggggttccgccaagatttttaacaattttactgatttcttctactttacgctgacctacgagtgcgactgtttttccttctaatcgtttcaatggtctacctccatttttctatgtatgctattttaatgatccttgataaccgagtttttcagaaattagacttgccgcttctgttactttttgaataatgaacggcagtctttctccttgaaatctcgcttcaattcccgctacgctaatgcctgcaaccacttcattttgatgatttacaatcggcgcgcttacagatgttgtaaagttttctaattcagaggtgctaatggtataccctttttcttttgcttcttttaatatatttcttagcttcttttgatctgtaatggttccaatacctattggagctagctccgtttgactaatatattcctcttgttctttttcgggtaaatgcgccaagataatgcgtgaacaagctcctgcataaagaggtgaacgccttccaattgatgtatagagacgtaccggatgaagcgtatctactttttcaatatacatagcttcattcccatctcgtacaattaaattaaccgcttcttctacttcatctcggagcgtttccattacaggcttcgccacacttctaatatctaaacgattagccactagctgaccaaattgcaagaataaaagtcctagtgaatagtatccttgcgcgtcttttgttaaaaatcccatctcttcaagcgaaccaaccatccggtgcaaagaagttttcggaacgcctgaatattccatcatttctgtgaaggacagcttagggtgcttgataaaaagtgtgagaatctgcatagatttaacgactgttttattgttagcttgcataaaaccttctcccttatttgtgccaatacatatatttgatagacgtatagcttactagctaatcatatgttctttttattatacatgaagaaaaaaaggaaagcactcccttataagagcactttcctttcttacaccatttctagttctttaatggaaataggattactttctagaaatttggttgtaaaatccccttctttaaaagaaggatggttcagtaattctaaatgaaaaggaatggttgtatgaatacctataataataaattcttcgagcgcgcgtttcatccgttgaatcgcttcatttcgatctttacccgttacaattaattttgccaccattgaatcataaaatggggaaatttcatagcctggataaaccgcgctgtctacacgaacgccgtatccgccaggaggtaaatacatctcgacttttccaggagaaggcataaagtttttagctggattttctgcattgatccggcactcaattgcccatccttttaactgaacatctctctgagcaaatgatagcgggtagcctgctgcgaccgaaatttgttctttaattaagtcgatgtttgttacaagttctgtaacagggtgttcaacttgaatccgtgtgttcatttccataaagtaaaaatgtccgtgcttatctaatagaaactccaccgttcccacacctgtataatcgactgctttagctgccgagactgccgccttgcccattttcgcacgaaggttttcatctaccgcaggagacggagcttcttctaccaatttttgatgacggcgttgaatcgaacaatctcgttcacctaaatgaaccacattcccttcttcatcagcaatgatttgaatttcgatgtgttttggctcttctaggtacttttcaagatatacgccgccgtttccaaaggctgtttctgcttcatgctgagcttgacgaatcgctttttctagctcctcttcgctatgagccagccgcattccttttccgccgccgcccgctgtagcttttacaatgattggatagcctatttctcttgctactggaatagcggtgctgctatcttcaatcagtccttctgtgccaggtacaataggcacgcctgcttgtttcattgtttctcttgctacagcttttgctcccattttacggatggcttctgcttttggaccaataaaggtaatgtcataggattcacacatctcagcaaaatcagcattttcagctagaaatccatagccgggatgaacagcgtctgccttggttacttgcgctacggtaagcagattacgaatatttaagtagctttctttagaagacgttttaccaatacaaaatgactcatctgctagcttcacgtgaagtgcatctttgtctgcttctgaataaaccgctacggttgctattcccatctctttacaagctcgaatgatacgaactgcaatctctccgcggtttgcgattaagacctttttgaacataatgactcctcctgacagtatgtatgctttagtatgtttttacagtaaatagaggctgaccaaactcaacaacatctccgtctttcacaagaatttcaagtacttctccttctattcctgcatctacttcgttaaacagcttcatcgcttcaatcacacacacaacatctttacgttcaactgtttgtcctacttgaacaaagggatcggcgtctgcttctggcttggcgtaaaacgttccgaccattggtgataaaatttgcttttcattgttttctggtgagtttacagacatagaatcttgaggcgcttgctcagcggcagcggctttcacttcctccgtttttacttctgtaacagctgtgtcttctaaaggaattcccgctttatcaatgacaactttcgtcccttcatgttcaatatggagcttttgaataccagattcattcattaatgaaacaacttcttgcaattcacgtacgtttatcatttttagtcactcctgttttgtgttatttagttgacgcaaggttaatagcaatcttcaattcttgaagcagctgttctttttctaaatagattttttctgcttcatgaagcaaaatgtgagaaaagtaaatggattccccgggctttatttgagctaaaagcggtaaatccgctgtgatgacttgagcgattttagggtatccccccgtggtttgacggtctgctaacaggataataggatttccatctggcgggacttgaacagaaccttgtgagacggcttcagacaatagctcttttttttcttgaagctgaagagaaggtccatccattcgatagcccattcgatctgattgattcgatactttaaagggctctttcataaaatgacttttactttcagctgtaaataaatcaaattgactgccattcataacacggacacttggtttctttgtaaaatgaacaaattctttataatttacagaccatgaagaagtatatactccgtttatcagttcattggaaagaaaagcaggcttcgaagcagcaggagctgacagcggtaaaacatcgtctgtttgtaatgctcttcctttgtagcccccaatttcgcctctcaaatacgtgcttttactatttaacacttcatcaatagaaaatcctccggctacagatagataggaacgacaaccggttttgcaaggtccaaatgataaagtgcttccttttggaataaataaaggtttccacatcgggactggctttccattgaccgaaggagttaaatctcctcccgtgattgctactaaacaatcactttctatttcaagggtaggccccatcagggtaacctcaagtcccgcttctttttcatcgttaccaactaataaattagcaattcggagggaataagagtccattgctccgcttataatcacaccgtgctgctgaaatcctcttcttcctaaatcttgaatgctcgttaataacccggctttattaactcttatactcatttttcaccctcctttgcctgtagttcttgatactcttctttagagataggtttgaatttcacgatatctcctgcttgaagcaaacttggcggattttgctccggcaaaaacagtttaataggcgtttgaccaattaattgccatcctccgggagtggaaatagggtacactcctgtttgcattcctgcaataccaaccgaaccggcaggaatagaggtgcgaggagacggccggcgaggcgtagcgattttctcagataatcctccgagaaacggaaatccaggagcaaatccaatcatgtacgctaaatattcgccttcagaatgaatactaattacctcttcaggtgttatgttatgatgacgagcgacatattcaagatcaggtccatactctcctccgtagcaaactggaatagaaaccgtacgatggtttaactctttttctgtctgttcgttttctagtttactttgaatgatagaagatactacttcaaaaggagaaacaaactccttcttctgcttttttcccacggccgctacaacttcaggagggttgtagaaaattgtaagatttgtaaatgccggcacgcattcaacaaacccagggaaagggtttaattcgatcgaatctttatacgttttaatttgtttgtgaatgtcgtactgaatactatctccaaacgttattacaagcgctgagtcgccaagcggagaaataacagccgatgcttttgttacagtttgattcatatctacacctctttcttttataaaacacctagtttttcatctcgaatatctgtaataaacatatgccccggagcatgtgtaatcataatagaaggttttgtttccattgctactgcttgaggggttacaccacaagcccaaaatacgggcacttccccttccttaatcgaaacagcatcgccaaaatccggagagtgaaggtcttcaatgcctatcgcagcgggatctccaatgtgaacaggccccccgtgcacagctggaaaacgtgaagttacttgggctgcccgcactacgtcttgctgaggaattggacgcatactaactaccgtcgagccgtggaatattcccgcttcagcgcatgaaatatttgttttatacatagggacattacaattttcttcaatgtgacgaacaggtatgtcgttgtttaaaagcgcgtgttcaaatgtaaagctgcagccgataaggaaagctaccatgtcttctgtccagtaatctgtgatatcggttacttcttttactagttccccattttcatagattcgatacttgggaatgtctgtacgaatatctcccgatggagcagcaaactttggcaccggagatccagcgtctgtgacatctaagatcggacacgatttagggttacgctgacagaataatagaaagtcaaaggcttgttgctttggtaaaatagctaaattagcttgagcatagccgtttgccatgcctgctgttggttgaataagctgattgttacggatttgctgacgaagttcagctggagttagttgtgaaaggtttgtcatatttctctctcccatcattgcccacacgcaacttacgtgcgggcacattgttttatttaaataattgaggaagttgatccattaacgtatagccgcccattaaagccattacaataacgacaagtacaccagaaatggtaagccataaaggatgtttatactcgccaacgatgctttttttgtatgcagcaaccagtaacgtcccaagagcgatcggcagaattaatccattgattgctccaactaaaagaagaacttttacaggttttccaattaagacaaacgacagagttgaaataataataaatccaataataatccaatttgagtttttattaagtttttcactaaacgtttgaataaacgaaacagatgtataagcagctcccactacagacgtaatagcggcagaccacataacaataccaaagattttataaccgacgtttcctgctgcaagctgaaacacggatgctggaggattggctgggtcaatttgtaatcctttagacacaacgccaagtacagctaaaaacaaagcgattcgcataacggaagtaatgagaattcctgttacagaacttttggttacttgaggtaaagaatcaatgccttttaccccagcatctagaagacgatgtccgccggcaaaggtaatgtatccaccgacagttcctccaacaagcgtaacgattgcaatgatatcgatttgatcaggtttaatagatttcacgacagcttctccaacgggaggtgaagtggtagctgctacatatagcatcagcccaatcatgacaaaaccagcaatttgcgtgaagcgatccattgcttttccagcttcctttacaacgaagattagtacggcaataactgcactaattgcagctccggctgttggagaaatacccgtaatcgcatttaatccaagaccggcaccggcaatatttccaatattaaatgcaagtcctccaattacaattaaaatagcgagcacgtaccctaatccaggaaataccatgttggcgatttcttgtccgcgtttttcagaaacggcaataattctccatacgttggtttgagcaaagatatcaagaataattgaaattaaaataacgaatccgaagcttgccgctaaattttgtgtgaatacggtagtttgagttaaaaagcctggtccaatagccgatgtggccattaaaaaagcggctccaagcattaacgtccagtttactttaggcgcagccgaaagcttttgttgaggtgttgatttttttattggctccaatatcctcttcctcctgattgtatgtagtttttattgtgaaatagccttaactaccacttctgatgctcgtaaagaacggttgacatgacgggcaaattcaagtgcgtgagctccgtctccatggatgcaaatcgtatctgcctgcaattctacatccttaccttgctgagatttcactttcccttctttcaccattgtaataacttgagaaacagcttcatcatcattttcaattaaagcatttggttctgtacgagcagtgagagaaccgtccaattgataagtacggtctgcgaatacttcattagccgttttcaaaccaattctgttaccagcttgaatcaactcacttccagataatccaaacaaaatcagctcaggatttacgttataaacagcttttgctatggcttcagacaaggctttgtttttagcagccatgttatatagtgcaccgtgaggctttacatgctgcatcgataccccttctgcttgcaaaaaaccgtttaatgccccaatttgatagaccacaatatcgtaggcttcctgaggtgaaatattcatgtttctgcgtccgaaaccgataaggtcctgcaaaccaggatgagccccaatttgcacctgtttttcagcagctaattttaccgtttttctcatgacgctcggatcccctgcatgaaatccacaggctacgttcactgacgtcacgtgctctaaaatagcttcatcattgccaatgcgataagcaccaaagctttcccctaaatcacagtttaaatccactttactcaatgcgttcttcccccttaaaccctttaatgtaagcgtaatcatttgcagatagtaaggaaaatccaagctatattatctgcatcaatacttgaagttccgttttccggaactaaagtaccgtttttcagttatatttggattttagcacgagatgatgaattgaacaacaacattgtcagaatatttgacatagtcattatttttacttggataatactcccttattttattggtgttttctatctatagccttaatataatgcagccgcttaatgccattggacacagtaaataactaggttgtcagaataattactagttcaaaataatcaaaataaaattttcgttgtaatcgttttcaacgaggtgctatatttcaattgtagtcaaatttatgcaaacgattgcaaaaaaaggggatgaaacgatgaaagggaaaaaatggacagctttagctctaacactcccgctggctgttagcttatcaacaggcgttcacgccgaaaccgtacataaaggtaaatctccaacagcagataaaaacggtgtattttatgaggtgtatgtaaactctttttacgatgcaaataaagatggacatggtgatttaaaaggtcttacacaaaagttggattatttaaatgatggcaattctcatacaaagaatgatcttcaagtaaacgggatttggatgatgccggtcaacccttctcccagctatcataaatatgatgtaacggactattataatattgatccgcagtatggaaatctgcaagattttcgcaaactgatgaaagaagcagataaacgagatgtaaaagtcattatggacctcgttgtgaatcatacgagcagtgaacacccttggtttcaagctgcattaaaagataaaaacagcaagtacagagattactatatctgggctgataaaaatactgacttgaatgaaaaaggatcttggggacagcaagtatggcataaagctccaaacggagagtatttttacggaacgttttgggaaggaatgccggacttaaattacgataatcctgaagtaagaaaagaaatgattaacgtaggaaagttttggctaaagcaaggagttgatgggttccgtctagatgctgcgcttcatatttttaaaggccaaacacctgaaggcgctaagaaaaatctcctgtggtggaatgaatttagagatgcaatgaaaaaggaaaaccctaacgtatatctaacgggtgaagtatgggatcaaccggaagtagtagctccttactatcaatcgcttgattctttatttaactttgatttagcaggaaagattgtaaactctgtaaaatcaggaaatgatcaaggaatcgcgactgcagcagcggcaacggatgaactgttcaaatcatacaatccaaataaaattgacggtattttcttaaccaaccatgaccaaaatcgcgtcatgagtgagctaagcggcgatgtgaataaagcaaagtcagctgcctctatcttacttacgcttcctggcaacccgtatatttattacggtgaagaaattggcatgaccggtgaaaagcctgatgagttaatccgtgaaccgttccgctggtacgaaggaaacggacttggacaaaccagctgggaaacacctgtatataacaaaggcggcaacggcgtgtctgtagaagcacaaacaaaacaaaaggactctttgttaaatcattaccgtgaaatgattcgcatgcgtcagcagcacgaagagttagtaaaaggaacgcttcaatctatttcagtagacagtaaagaagtcgttgcctatagccgcacgtataaaggcaaatcgattagcgtgtatcataatatttcaaatcaaccggtaaaagtatctgtagcagcaaaaggtaaattgatttttgctagtgaaaaaggtgctaataaagtcaaaaatcagcttgtgattccggcgaatacaacggttttaataaaataattaaaaacacctctacgtgattatctggtaatcacgtagaggtgtttttcacatagaaagaataaaaaagcgtcacagttttttgttctttctatgtgaaaaatgcagtatttctcgtcagaaagtgtaaacagtgaaactttaataatatatagtgtgttaaatctttctttcttgattgaagggtgaggttttgtttttcagctttattagtttacataagataaattttcggaagtgaattatgtatataaatctatagcgcatagattcccttgaaagcctttgtactggtatttttcacaaaaatgcaaaaaaagatatcctatttttaaaaggcgcaattatagtttttctttttgttttgatgaaaactttataatggcgtaactgatagttaacacaagaatagcgcaagtgtgcaaaagtgtattaactgggttatcgtgctctacaataaccagacgtatcaatgcagtaatgccaatataaagaaagtagcgtaaaggaaagtgataattctcctgaaaatattttacgatcattgcaatgaattcaaaatacaaaaagaaaactaagatactttcaagaattttgtagtgagtctcaattcctcgattaaaaatagagaaatgaatgaaatggaaaatttccttaccaagcaaaacggataaagtaacagctagtaaaatcaatgctgtatttaagataagccggagaacgtgtgaaaccttaaagttcggtcttttgttttgttgtatcatcaatatgcctcctacatacatagccatatagcctctttactttattatatcttctattttagatttatcgctagccggtacaaattgtttgttagaatgtttattttaattcatgcattacactaaataaagacgtatatactatatattattagttaacataacaattactatgttaattagagacgtatgaaaaaagcactggatttttatcagtgtacaaccttttgtcctcattggttatacttattctcaatatttagagcaattaaggttccttcttttaaggaaaaaggaatataacgatgtcgttatattccttttcacacatggcaaacataaattttgaatcaacaaagagatgaaagcactgaatttcgttatttcttgatgaaatttttttctttcaacaggtttattatcactgaattctatcttattattcatccaatatttaccttgtattctttttttgaacaaaaggaatcttaaaagcatacaaggaggtgaatcaacatgtcaaacaacaacagtggtagtcgtaatcaattattagtacgtggtgctgagcaagcaatcgatcaattgaaatatgagatcgctagcgaatttggtgtaaaccttggtgctgatgcaacagctcgtgcgaatggttcagtaggtggagaaatcacaaaacgccttgtagcaactgctcaacaacaattagctggcggtgtctcaggacaatctggtacttctcgctaataactcgtgaagagttataaaaggttagataattaaataggtcttgatggctttggctacctatatttgtaggtagccttattgtttttaagaaaacatctcttcacacttgataaatcccttcttttatacccgatacgcttatcttctacaataacgaataaggaaatggagtattttctaagagtttttcttggtcttttcatagacagataagtagactgtgactattgaagagtaatgctgtgtagtttcagctattactctttattcaatagaaaaattgtgggttttcctttttaattatataccaatctatcttctactccccttttaagaaattgttatattaatgataactcaatagaaaatttaaaagtatttaactttagtttgcttttaataagatatagtcaatcaaaaatataaaattaatacccttcatataaaggagtaaaaagataaattaacttataaaaatcaaagtttgactatttactccacctgtcgacaaatagaacctttttcctccctacattcgtaattatttatagattaatttatcattcaaaaacattctgtaatacatattacattgccgtaaaggtaaagagtcagcacaaaatgccgactctttaatgtaccggaaagactatttaagatttttacttatatattgtactatttttcttagctctgtacttgtaggacgaccaaaagggcttgtttgtttttgttgataaagaagacgtcctttctcatctacaaggaaataggcaggttccccgtgagctccatggtcttcatatggagcgtcttcaccatgaaagaatacgtcaaaagcttttaaagcctctaaatttttatctgataagacaggatatgaaaggttgtattcatctgccattttctttaaattatcaagttcatccgtagagatagtgattaaatgcacattcttactttcaaaataattcttattttcttctaagtcttttaaatcttggacacagactggacaccatgcccctctgaagaaaataattaagtgccagctttgatgttctttttgatgagtctcatatgaaaatgtttcacctgtagtggaagggagaataaagttagggatgttttcattcaattttaattgagtcattttggtacctccaatatcttaattcactttgcaagtgttgaccacaatattaccttactcttgataagaaatatgtaatgctatttactttttaagtgatttgtaacagagtatgtaagctatcttacattttcccaacagactaaggtttgatttagtctatatagagtgagattttatgtgtagagcgggaggatgtctgaaaaaataaagaaggtagaagattttgtgcgtaaaaagtgggttcctgaaggagctgattcagcgcatcgtgtgcaatgtatcagctcctataaaattaaaacatgctcccataatcctagctttccctttgctggaataaattcatccagcatctgcatatcctcaactacccaagcataacctcccactataaagttacccataaaatagtcattccctgatacgattcgaccatcctccagaatggcccatgtctcattgttttcagttaccttcaaacaatctacaagtttgcatacagcaataatctggccagttggaagattctctggtgtgtatccgtgcttaccaagcaacgactttatggctatatggttagagacgtctttatctatttttttacttgtgtgaatggcaagtggcccccgataattcgttctccatgaccttgtttcatatgttgcctctctaaggacaaaaaggcttgcccacggctggatcattgataaaaccttcattctgacagcctccaatctatagaagtttattttgattatagagtgtccctttcaaggaatattatgaacaaaaggcagaatatcagttcacggagatccaatttatgaggcatgagtcatgactagtgatcattaatatcatatattaatcagcgaactatttttgttgggttttacaaactcactagatgtgattgggcacgaacttacacatgtagtgacccagttcacaagcgggctagaatatgaaaagcagcctggagctttaaacgaacagatttaatgtggtttgttataccaattgtggaagtttacgtaacggaaggaattcaactggtgaatcgattcgactaggcgtaagtaaaattaatatttatagtgatatgaagtatgcatattttacaaaagcacgcgaaattctaagtactactgaatactgggatccactttttttccgaaaagctaaacaaaaagcgtttgtcaggttgaagggtgcaatggtaaacacaagagtttaggttattgttcgaagcattataaacgatttagaagtaatggagacccttttttagttgcgacaacacatggagagattaaaactgaattttgttggagtactacgtgtagaagggcatatagcttctaaaatagtaaaacatcataatgatatgctagatagcagattcgttacattaaaaaagtaaacgaaattatgttttaagctaataaataacttatcacaggaacaaaaaatatatacttttacggactatgaatttgattttgtttcaaaacgctaaagggataaaatcaattatctttcttttaacttactttttacctgaagcaagtttttttgtttctcctactaaaagacgtaagaaaatcatataagttataccgtatcaacctattctatccctcttccctctaatttctacataatattgacctggaataaaagaagtaacaagctcgattaagtaaccatcttagagtcataatttgttcattaaatgaaagatccactatttttatggagaaaaacaccaaatttatatatctaatatgcagagaaatacgctttgaagaaattaactttagttttacatataacgaatcattcaatacaaatttcaagagtttaaaaacttttttatttctttttatctgtccaaaaacgacttaacatttaacatcaaaaataatgaatgttatcatcaattaccttcactgttattgatggtaatgcaatgttattctatataagaaatcaatcaaacacatcttaggaggtatttacatgagtggacatgaacgttcactaccgaagtcaaagggaaacacatttgcactatttgctttggccgcaacattttttggtgtaggagtcacagaattcataagcgtaggtgtccttcctgctgtcgccaaggaatttactatatcaacatcgacagctggattaattgtttccatgtatgcgctaggagttgctgtaggaggtcctattttaacttctctgacggctaaaatttcacgaaaaaaagtgttattatccgttatcgttctgtttattatagggcatattataacggctatcgctcctactttcagtattgtactaacaggacgtatactatcagcattcgcacatggtgtgttttttgctataggttcaacggttgctgcaagtcttgttcctaaaaaccgtcaagcaagtgccattgcatttgtatttggaggattcacgttggctactgccattggtgctcctatagggacctatatcagtgatattttcggttggagatttcctttttacggaattgcatttattggtgtaattgctcttattcttaacgctattgcaattccaagtcaacaattaaaaacagaaacacctccatcttataaagatcaattaaagttagtaagaaacggaagaatcttgttggttttagcagttactgttctaggatacggtggtacatttgtaacctttacgtatctttcgccaattcttcaggaaatcatgggtattgctgctaagaacgtaagtattattttatttatatacggtatagctattgcaattggaaatgctatcgggggacgttttggagatcgaaaaccacttaaagctttactttatgtgttcattgtacaagctattattttattgattttcacatttactgcgccgtttaaagtagttggtcttattacagttgtagctatgggactgttagcatttatgagtgttcctgtattacaatcatacgtattaaccctagctcaacgttatgtgccaagcgctgtagatgttgcttcatctcttaatattgcttcatttaatggaggaattgcattaggctcatatgtaggtggacttactacggatatcatggggttaaatcacacaccttgggttgcctctattatggttttattaggtgttcttcttactttcgtaacgatagggttggaaaagaaagaagatgaataataaagtttgaaagataaaaattagttattgaaatgtcatcaaaggttcttataaatagaatttcttacaagaaataaaatgctttaaaagggaattatatgaaaaaattggcaaggtggttatagacgaagtatgaatctatagccttcttgctttatttttttaatcacaaaattgatatagaataggctcaaccttattcatatttttatctgaaattgttaataaaatgtaatcatgagatgatgaagtacatgtaaaaaaatgaacgaatgattgggtattttcgaaaggagtaaaacagatggagttacgtcaactagtgacttttcgaatggttgctctaacactgaattttagtcgagctgcagaggctctaaactatgttccctcaaatgtttccatgcaaattcaatccttggaggaagagttgggggtaaaactgtttgatcgtttaaacaaacaaattgtattaacagatgctggcgaacgtttctataaatatgtagaaaggattttaaatgatgttgaggaagcaaaaaataatgtgaatgatagtgaaaacatgactggcaccattaccattagtgcaaatgaaattttatgtgtttatttgcttccagccattttgtatgaattcaggaaacaatatcctaacgtacgtgtgattttccgtccaacaccttctaacgacctaaaacaatctatttatgaagggaaaacggacattgtatttatactagaggagcctgtaaattcaaatggattaaatattgagcttcttcgtgaagagagctttcgtctcctagttgctcctaatcatccccttgcaagtcagagcaaagttgattttgatgacattcaaggagagtttttcttattaaatgaaaaaggatgcacatatcatacaacatttgatcgactacttgttcgtgagggagctaatgactttacaacccttgaatttgatagtgtggaagccatcaaacagtgtgccatgctgggaatgggaattgcttttcttcctgaaatctctgttgcttccgagcttgaacaaggtaagttagtttctttatctttagatttaacagaaattaattttgtttctcagatgatttggcataaaggaaagtggatatcgcctgtcattcaagtattccttgatattgcaagaagttcatatcaacataaaaattaactatttcttttatgaagttactatcatcgcttttatggaaccgaattgggctatttttatagggacgagcaaatgtataaaacatgcgctttttatacatttttttctcgttcgtctcctaataaagcgttagtatgccaaagatgtataagaagctgcatatccgataaaagtcatcctactccgaacccttctcttgcatgggttcatttttttgcttgattcctttaagagacattatggtgcgacaagaagtcgctttcttacagtgtagctgacatatatttgtatgtcccttttctctttttaacgattaacattaaacaaaaactaactaaatagagttttgatgcgagaataattcgataaggatattaaatttccccgataaaaaaactgtatggaataaattctacacagtttttttgaaattcctattagattgtcagcaactccaacaagagtccttttttaaagtggattttcaaataacatccaagggcattttcctagtaggtttaggaaatacttgatcaattctaatgagatcttcttcagtaaactcaattgttgcagcttcagcatttgctagaacatgttcatcttgaaccgcttttggaatagcgatgacgttattcgaacggatggtccaagcaagagcgatttgtaatggttggacattgtatttgtcggcaatatcatgaatagttggatcgtttaaaagctgtcttcttaaagagcctccttgagcaaggggactgtaggccatgattggcatgttatgttcacgctgccatggtaagagatcgaagtcgattcctcttgaacctaaatggtatagcacttggttcgtcacacaatttttcccgttcgtagtgttccatagctcttccatatcaaccgtatcaaaattagagacgccccatcttaaaactttcccttcttcacgtagtttttccattccttcaattgtttcctctaaagaaacacgtcctctccagtgaagaagatataagtccaagtggtctgttccgagtcgttttaagctgttttcacatgcttttgaaatcatatctaaacctgcatgatggggatacacttttgagactaaaaagacttcatctctgagtcctttaatggcttcgccaactaagcgttcagaatcgccatttccgtacatttcagcagtgtcaataagtgtcatgcccaattctacgccgagctgcaaggcttttatttctttgtctctcacttggggattttcccccatgtaccatgttccttgtcctaaactaggtaaagaagtgccgtcaggtagggttaccacgtgtttagctaatgcatctttaattcccgcccttttcttttcatccattaggctcgaccctttcttttatgtatttggttatcatagaagtagactgttaacatctctacgtataaagtacgcatatatttagaattcccgtaaccaacaactcaattctttattgcatgatatgaccatttctgcttccttctgtgcaaaaaaacaaagaaagtgaggatagaggatagcctatgagtgtcagacgctcataggctatcctcaccacttctattctaaaccaatttatcaatcgactttgatatcaatggattagatcagatgagctcctccatcgataagaacggatgtgccagttgtaaacccatttttcgctagataaacataggtttcagctatatctttaggttgagcaacacgtccgacaggtaattgcttagcaatcccatggtacataacttgtctttgatcttctgacattccgccataaagaggagtgtcaacaataccaggtgataccacgtttactctgataggtgccaggtctactgaaagtcctcgtactaatccatcgattgctgaattaatggaagctagagtcgttgcaccttgaggaggacgcacaccatatacacccgaagttaatgtaatagaactttcattattcaagtatggaagagcagcacgaaccgaaatatactgcccccagaacttactatcaaaagcctctcttactgttgcaacaggcagttcgctaaagtgacccattgcgccttcacctgcagtcaccactaggtgatcaaattttccaaccttcttgaaaaagtcagcaaccttttcttcgctacgaaagtcgatttcatagccctctgcgttaccaccaatcttcacttttgcgtcagataattttgaagcagaacggctagcaataatgacttgggcggattcatcgagaaacgccttagcagcggctaaaccaataccagatgtacctcctaaaacaaccactctttttccttttaatgatgacaacgaaatacctcctttattcatacgtttgtttgatcaacttgcggattctgattaaagaatccgcaagttgaaaatatttaagtttttacatcaccattgttatttagctaaaagttttagtgattcacgattgaatgctggaatatcttttgcttctcgacttgttacaatatttttgttaatgacaacttcttcgcctttataatttgcaccagcatttttcaaatcgttgcgaatggatttatagccagtgatgtcgacaccctttaaaaggtctgtatcgattaacacttgtggtccatgacaaatggcaaaaacagtttttttgtcttggactgcttttaaaataattggttatttactcaagcgcctttcgaagatcctcaattaaatcttctacatcctctagccctaccgaaatgcgaaccaaaccttcagtaatgccgagctctgctcttcgctccgctggaatggatgcatgtgtcatgcgggccggcacggatattaaactttcaaccgcaccaagactctcagctaaagtgaagtaatgaattttacttaatagatgatctgctttttccccactgcccacgtcaaatgacaccattcctccaaaacctctggcctgttttttggcaatttcatggtttggatggttctcaaggccaggataaaatacctttttgacagaagaatgctgagtcaggaagtttacaatagctgcagtattttcctctgtctcttccattctgatacccaaggttttgatccccctcattaatagccatgaatcctgaggtcccagtacaccacctgtagaattttgcacaaagtggagatcctgtgcaagcttctcggtgtttacaaccacaagacctgctaccacatcgctatgtcctccaatatatttggtggcactgtgcaatacaatatctgcaccaagttcaattggattttgccagtaaggtgtggagaaagtattatcaacaatggttaacagaccattttcttttgccaaactggaagctgcctcaatatctgtaatttttaaaagcggattggttggtgtttctaaataaagagctttggtattttcacgtatctcactgtggatatttttcaggttgcttgtatctacaaaggtagattcaattccaaatcgattcagcactttgctcatcacccggaatgttccgccatatacatcatctgtcatgatgacatgatctcctttatggatttcttccaccagctcttcagctttttcaatagctcccttaaaaaagttgtttgatttaatgttgacaatccatcttgaatttgaaaaccgacctctgtttcattttgagaggtcggttcttaattaagttcgattatgctgtttaagagatggctttaaagatttgagttaacccctcattaattggtgtagctggacgtccaagaagtttttcaaaatcgttgctttcgatttctagtgtgccttctcgaatccctttctggatgtcaacaagtataggaataaggaaatcaggtacgccggcacctttcataatatcggcataagtagcgtcatcaaccagctgtacagacacttctttccttaatacaatgctaagagcagaagcaagttcgtcttgactcaatagcttacctgaaagttcatagattgtattttcatgaccatttccagacagtactgtagcagcagcctctgcataatcttgttgaagtgcccaacctactttgccatttcctgcagaagttacccatggggctcctgctagtacaccttgaatgcttgaaatttcattctccaagtaccagttgttacgtaagaaggagtaggaaatacctgttttcaagatagcttcttcagttgcctgatgcgttggagcaaggaagtttttacttttctgtgcgtttactatgctagtataagcaataaatttaactccagcacgctctgcggcagctactccattggtgtgttgacgaattcttgtttcattatctccatccgcagaaatgagtaataaccgatcgatgcctttaaaagctgcatccaatgtttctggacgatcaaaatcaccttgacgaacgtctactccctgaactcgaagtctttcagctttctcaggatttcggacgctgacagctagttggttcgctggtacagttttcaataaagtgtctaccacttttgttcctaatctccctgttgcacctgttactaacattttcatgaataattcctccatttttatatttttccgttataaccaattcggttacaactaatgtataaaataaggtccattgaaagagattttatttatacgggataatataatattatagtcttaactgtttttttaaaagtagtcatttttttatgacatagtcacaaaaatagaaccattaagaaagagaggcatttattatggcaagaaattggatcggtgaacctccagagcagcataaagaagtttgtcctgttacacaaacacaagaaattattgctgggaaatggaagatcattcttctatggcatttaagcatagaaactaggaggtttaatgaacttcaaaaacttctacctgatatttcaaaagggattttgacacgtcagttaagagaactggaagaagatcaaatggttcacagagaagtatataaagaagttcctccaaaagtagaatactcgctaacaccgttaggacaaagtttcattcctatcctgcatagtatgggagaatggagcaaaaaatatttaaagaaccaaatttaaaaagttacctcaggtcgtcaggtgagttagcttacaaaggaaacttaatatgaactttgttccactatataacatagcttaaattccgaaaaatactatttttataagggatagcatatgcataaaaggtggacttcttatacattgttttcattgatttgatcaatagaatgcctattctatcagcaatgtgtaaaaagttgcatactccggaaaatgaaccctcggcggaaccgtgggactgcaccctgtttgtgagacaggactcaaagcaccttttaaacagccagctgccggtattgtactggtgactggttgtttagtttcgtttgaatacgggcattgttgtaataagtaatctagttttcgacgatggtggtcgtcgtatatgttaactcgtcgaggtagaacgtttcagactttagcgaggaatgaaacgattcaatggaggcattatctgcgggtgtccctttacgggacatactcatagtaatgcctctttctttaattttttgttgatagagatgcgatgtgtacacagatccttggtcactatgcaacgtacatcctttaggtaaaaaaggaagttggcttaacgcatctaaaacaaattctacattttggtgatcaccaatcgaatatgcaatgattttcccatttacgttcactacgattgctgggagcacttcctctccaattccttgtacttttttaagacctcaatctgttgtgttaaataccggttttctgctttcaatttggacatttcgtctttaaagccaggtccctttccgtatgaatactgcttgcctacaggctattaaaatcgatacatttctccatttttataccatctcatccacctttttaattgggtgtaactgcgaatatttaattgggaaagcacttctttgacaggtataccagctaatctcatctcaatagcttttatctttatctctgctggataactaactcttgtacccatggaaaaaacacctccaagtgattgttaggtagtatatacccgttttttaacttaaaggtgttttttatttgtctcactattaggggtcagtccccctactgccgcaagggttcttttttgatgtgtgttccggaaagagtgattatgttaactaaggttgtatatcatatacagcttaaaaacagaaaaagtctacctcttcccagtcaaaagaggtagactttttctgttttatgaatggtaatcaatagttagctgacattgcagaacgtcttgagtagtttgctcaaatgataaaaaatattcaatttaagcaattacctaataaagaatgaaaacatataaggtagccaaaaatctcttagaataattttttctaagagatttatcgataaaaaaacattcatgagagctagctaaagcttatacatatagtaagagataatttgactaaaaaggtgattattatttttcgaaaaataccggttgttcttgtcggaagcttattattaagtataggaattaatggatttttagttcctcattatttgttggatggagggacaattggaattgctcttatccttcactattattttgaatttcccacaggtgtaacgatgattattttgggcttcccattatgttggtttgcttgggtttatgaaagaacttatttttataatagtttttatgggttaattatttcttctttattgattgattggctagagcctattaaagaccagtttcaactttctgtttttcctagtgtgatctttggaggagtatgtattggaacggggattggtcttatgcttcgatacgagacaagcactggaggaacagatttactagcccaactactatcaaaagctttttctttgaacataggaatcgtcattttaattatagatggttttatcataacagcaggtcttcctttattaggacctaaaacgtttcttttttcatgttcgacaatttttataggtggaatgacgacttcgttacttactaaaaaagaataatttggattataaaatgagtatcttctatcctccgctttttgccccttcttgatctttataaatttaaaaggcccttacaacaactttgagattaactaaagggttttttttatggttggttcctagagaagacattatggtaactagagatacttgttttataacatatgatttatgtcaatttaaattttaataaagttgacataaactatatatttcatgcaaactagtaaaggcaaccaaaaaaggggggattatttgaaagtaagaaactgggatactcgtacaagttttcatcatggggattccactcgcacaagccattaaaatcagcttaatctatattcctggtgaccttatagaggctcttttagcctcatatctcgtatacaaacttcgaaaatcgccagtactgtatcatgtcatttttaaaaagcgcaagtcataatagtgccttgcttcttacaaaaagataggttcaaagacagttatatttgtaaggaatagttacagtgaaagtaaggagaattaaaatatgtatgatatcacaattgttggctcaggtgtaagcagtatctttttggcttacaccttgttacaaagcgatcaaaagattttaatcctcgaaaaaggaaaaccattggaacaaagagattgtgcatcagatcacggtgaaccatgtcattgtgacttatgtgaaaaatattttggctttgccggcttaggaaagtccgaagggaaatttaattatacgagtaacttcggcggagagttggcacaaaagatagggaaagaacatgccatgcaagcgatgggagaagtggatgacattctctgcttgtttggaggtaaagaaattgcaaagtattctacagtagatgcccatcttgcaaagaaagctcaatcatgtggattacagatgttaacaacagaagtgagacacttaggcacttctctttcaacacaaatttttcagagaatgtatgacatgctgtctcgcaagattgaaattcgatttgaggtagatatcacagagataaaaaaagaggcgcattcttttataattactacaaatcagggaatggtatactctcataaaatcgtacttgcgacaggtcgttccggtacagaatggttacaaagacaatgttctatgctaggtgtcaaacaagggacaacccgattagatttaggcgtgcgagtggagatgaaagagcagcagcttcgttctatcttgcaagatacctttgagaccaaactttcttatacacatgaagatcttgtgtctaccacatattgtatgaatccacgaggaagaattgtgcgtaaacatcaagaaggatttgttatgcccgatggtcaaaactttcgggagaaagcgaacggcacttctaatctaaatttcactttattcacttcccgttacttctctactcttgtggatgccaatgcgcatgcacaaaaagtgattggaagcattaatgacaacagagagcgcattattgtgcaacgtttaggagatttacgggcaggtcagccgacaacagtgaaacagatggaggtcaatcgtatttttcctaccctgcaagcagagtgtggagatctcactgcacacgtcccttccctatatatacatattttgcaggaatttctacagtgcctagaagcatttatcggcgaaacaattgatgaggatacactactctacgggatggacgggaagttttattctcctatcatagaaacaactacacattttgaaacaaatgtatctggtttgtatctcgttggagattgttcaggtattacaaactctttatcacaggcgtcggcaagtggaatctatgtaggacaccacctatgtgatagtggtagtcacaggtaaacagaatgggtattaaaaaactgttgggttctgtgcttattctttataggcagggtcttaaggaacctaccctaatattgatttagtctagaaaaagcaaatttatagcattaagtcattatttatataaaacagcctacattctaagtgtttaatacaaagaatttaggctgtttcttaaaaatcgtaaatatttaatgattactttcactaggaataaaattaacttcaaggtacataaatttaatgagttaatattaagtgttttaccatttatacttattaacgacaaatattctctgtctccactgcaatttgatccaactaaaaatcgtataaatcataaccctgttgaaaccatgtgctcccatgtctaataactcagctaaatgatcagcataatatctgatgacttcagccgttaccctttcaaaagataaataataaaataatatgttttcctcttcatagtaactcacttcaaataggttggtttcagaatatatgtggccaaaggatgcattttcttgcaaacttcttttccaataatatattctatacttttcaactactcctccaagctgacttcttattaaccccagttgatccaagatatgttgcatccaaagtgccctagtatggtcaactattcgaatatgaggaggacacacagttttatgttgcagtgatgatatgtcaattagcctttctattctaatatctttccaggcatcacaatccaaaaaaagaatactttttgaacattgcatgtcttcctgccctgttccagcacataatttatgttgaatctcatcattttcctctataaattcctgtgcacttctacacttgttaatccattttacaatatcatcctgaaagggtttattagctcccctctttgactcaataaagactgcttcaaaacgttgtttacaaggatcccaaaatgaagcaacagaatccatagatattgtatcgtcatctataacatcatcttcatcagaagtttcttcacctctccttttaaagtcttgatttttcaaagctaacaacccgaaccatttaaaaaatggacaaaataatcttcatctctccgccaccagttctctaggctaatttgtgtagttcctttaaagccgtttcctagccttgcctaaagcataaaatttgattttgtgtataaaggaaaataatatagatatatcgagaattatcaatatccttttgttcgatttgtttgtacgcattcaaggcaaaatagattttaataagattagaaagggcggacaccgttgaatcgggaatcaaatatgataaatgacgaacaggcagttgaaattttcaaggctctgtcaaatcaaatcagagtaaatattctgcaaatgttgaaagaaccggataataatttttccccgcaggcccatgtcatcaaagaaaagggctttgatggcggggtttgtgttagtgatattcgtagcaaagtaggactatcacagtctactacctcccagtatttgtctatcctattacaaagcgggatggtggaaatgaaacgaatcggacaatggacttattatcgacgcaatgaggaaaccattaaacagcttgaaaaatatataggcttaaaaatataaccttttaaggaggaccaagagtgagttttcaaaatcatcgtgcctataacagcatgtaccagaaagacaaaatgacactcggatttatcctcccgactgccaggatgtctaaagatccgattatggagaatcagctggagcttgcccgtaaaattgaggaatatggctttgcttcattatggctccgtgatattacgatgcagaatttgaatattgatgataacggccaaaagtacgatttatggatttatttgacgtatcttgctgcctatacaaaacacattgcgttagtgacaggaagtgtagttctccctttgcgccaccctgtcagggtagccaaggaagctgcatcaattgatcaattgtttccaggtcgattgattatgggagtggcatcaggggacagggaaaaagactttacagctttagggatgtttaagcaagaaagcggttcattattcaaagaaaatttcgaaattctcgaccggctgttaaaagaggatcagccgacaatccacagccacgccgggctgatcgatggtacagatatgaggttaatcccaaagcctgtatcttcgattccgaccatggtgactggatttagcaatcagtctatcaattggatagctaggaacggggatggatggcttcaatacccaagaagcattattcaacaggagcagcttatccaggattatcgtgctttaactgaagttcatgctccaggagattttaaacccttctctcaaagcttgttcatcaatttattggaaaatcccgatgaaatgcctgtccccatacccttaggctattccgtgggaagaaaccgtttagttgatctacttcatcaatttcaagcgattggtgtcaaccatttggcgtttgttctgtatttttccaagcgtcctccagaggaagtaatccaggaacttggagaatttgttttaccctactttccaacccataaaggtacagtccagctttaaaaaattaaattatataaaaggaagaagaattatgacaaagaaaatcgaactttcagtactagatccctccccaattgtcgagggaggatcagccaaactttctcttcaaaacacgcttgatctagcaaagaaaacagagcagtggggatataaacggttttggcttgctgaacatcataattgggcaggaatggcaagttcagcatccccgatagtaattggacgagtggcctctgtcacggaaaaaatgcatattggatcaggcgcaatgctactttcccattattctcctctttccgtggctgagcactttggaacattagaaaccttcttccctggccggatcgatcttggattggggcgggcacctggtaccgaccaatatacagcaaatgtattgcggcagcggattgctggtgaacctgaatttgatgcccggcttgaggagcttatcgcatatctttatggtacaggaacagccactaagaatggttcatttggctttcacgccattcccggcgaaaaaacaaatgtgccaatttggctgttaggttcagggttttatagtgcacaattagctggaatacttgggttaccattctctttcgcgggacattttgctccaggtaacatgatggaggcgataaaactgtatcgagattcttttcgtccgtctcaatttttggaggagccttatgtactgttagccgttcaagtggtggctgctgatgagaaacaggaggcacaaaggcttgccacttcgatgtatcaaaaatttcttttgttaacccgcggacagccttcgcccattttgcctcctgttgataatatggacgagctttggaacgataatgaacgcagggcggttgaagaacagcttttcacttccatcatcggggaccctgctgacgtgaagcatcagctccatgagttaatagaaaagactgaagctgatgaaattatggctcatacagagatttttgatcataaggcacggctacgctcttatgaaattctggcccaggctacagtgaattaaacagtgtctagtctaataaaggatgtattttctgcagatattaaatcagttaaattaatgtaatttagattgaagcagtaaaagaaaacaaagaaaacagcctgtaaattcttttataggtttgaaacggaaattttaaagaaagaagatgagcatatgcctgaaaatgatacaaaacaaattacggatattccattctcaatcctggatctctctccaattgcagatggaagtacgccggctgattcttttcgcaatactttggagctggcccagctcgctgaaaagctggggtataaccgatattggctcgctgagcatcataatatgccatttatcgccagctctgcaacatcggtagtcatttcccatgtagcagcaggtacatcaaaaattcgggtaggttcaggcggcattatgctaccgaatcatgcacctcttgttattgctgagcaatttggtactctggaatcattatatccaggacgtattgatcttggcttgggccgtgcaccaggcactgatcagcttaccgcacgtgcattaagacgtgacttgagaagtttgggagaagatttccctgagcagctggctgagctccggaattactttgacccttccctggcacaaggaaatagtcatgttaaagcaattccgggtgaaggattaaacatacctatttggctgttaggttcaagcggatacagtgctcagctggcaggagagcttgggctgccgtttgcatttgcgagccatttctcgccgcataacacactgccggctatccagttgtaccgccgttcgtttaagccttctaaagtactggacaagccgcatgcaatggtagggctaaacatcattgcggctgacacagatcaagaagctgagcggctcgctacaacattgcagcagcagttcttaaatttgatgcgcgggaaggaagtcccattgcagccgccagtggataatattaacgatatagcgagcgactatgaaatagctgcccttgagaatcaattaggaacttcgattgtcggcagtcctcaaatcgtaaaagaaaagctggaaaagtttctggatgaaagtcaagccgatgaaatcatggcaatcgcccaggtttatgatcataaggcccgcctccattcctatgaaatattggcagaaattactcagctaaaataggtcaaaactggacgagccttatggcaagcttttaatgtatctccataaattttttgtatagaatataaaaaagtgcctgtcaaagaaatttttgtactctatgttatccagttgctcaatagcaaaaccctttaaattactttaacaccttgtaatagatttaaatatctcatccgcaaacgaacgtatagaataaagggagattatacagaaaagaccacaaattaaaaagtgtggtcttttctatatattttaagctattttctattcgagattagcatgtttactatacattttattagaatctatgcttttttctctctaaagcgtaagattaaggcatcataaaataacagcattgtttgctcaaatagagatcccattggttgaatggtcctgtaatcaccttcagattgatctttcgtgactcctggtaatttaacagtaatatcagctcactctccaatggttgattcaggagaaatggttatagctgcgactgtacctcctaagctttttcagcaatggcaactaaggttttggtttctcctgatcctgaaccaatgattaataaatcgtctttttctaaattagctgttactgtttccccaactacataggcatcaatcccaatccagatctgcctgaaccagccacaaagattttcttggattctaaaatctggtttattaatttctctgcttctgaatcaccaatcaagtggattgtttgacttaattcttgaacgacctcggctacatattgagtaatcttcattgttaaattaaccttgttcaattaattttttcatttcgcgtgctgtagcttttttattttctttattcgtaattcccccacctacgataaccagatctgggtgttgtttaattacttcaggaagtgtttctaatttgattccacctgcaatagcagtttgcgcgtttttaacaacgcttttgatggttgaaaggtcttcgaaagaattctttccaactgcttgaagatcgtaacctgtgtgaacgcagatataatcaacgccaagttcatccagttcttgtgcgcgggctgcaatatccttcacggcgatcatatcagcaaggatttgtttgccttgttttttagcttcttctactgcgcctttaattgactcgtcttctgcagtgccaagaatcgtaatgatgtcagcacctgcagcagatgcttggcttacttcatatccagctgcatccataattttcaagtctgctaatacggttaagttaggaaatgcagcctttacttctttcactgctttaagaccttcattgatcaccacaggtgtaccaatttctacaacatcaatatgctcttctacctctttcactaattcaatagctccctgaatattgacaagatctaatgctaattgtaatttcatttatattcgctccttttaatatgattttatattgtgctatagtctgtcattatactggtgtaagggtttcctttcgaaaagctatttactcaccagcacgtttcttagtatactcattattttttacaacagatgtaaatagtaaagtacttattacaagagtattttactatttacatgcgtcaatatgatgccattctccttaaacacctgagccgtaaatgataagtactagctttttcttcgatggaccactctcctattcagtttttgatacaaaacaaatgtaattattcaagaaaattttgtcatggtttatttttttacatttacattaaaaaggaaaactgttgcatcgtaaatcatagaccagctaatactaattttacgactaagcaaggagatgaaaatatatgaaaagtaaaaaattagaaatacaatttctaaagtgtataaccatcatatttttaggtagcttaccctttgttttaaagaaaactcctattaaagattcactgttggtcttgtttatgaatggatatacaaatgctatcgttgacaggtttctggttaaccgtcaaatacttgaatatcctgtacgctatatacctaaagagtttaaatcgaatgttttatttgatttcttatgtttaccaactgtttctttatggctttatcatttaacaaaaaatgataatccttttaaaattgtatataagattgtacttaccatcagttcgctatttttagttgagttatgggcagaaaaatatacgaaactaattaagtggcaaaaaggatggaaatggtattatagccttattagccttaatgtaagagctttatttagtcgtttagtaattgcaattattaacattatagaaaagaaacaagaaggttaacctgcgctcttactagaaaaagtaatcttgtgtcttcctcttattttataggtggaaatccaactggttctgcttcttcaaagataaacaaatctaattgtttagtcgcgaatggattaccggatgcttcccaaccagttaatgtaccgaacagatcttcatttttccatcctgttaagttatccaaatagatacttcactcatatgagcatgagaagaacttggaaacgctgctcaggtattgtcacaatcatttataaataaaaacctagttaatgaacgatgtgttaagtaaacagcaccagaaggtatgtcttgcagcagttcaccactaatattggcccaacctgcttcgatcttttcattttgtgggtgtttcatgagctttttgagttctcgtttatcggaaataagcttgttaaattcttcaattgaaagagatgtaatttttttaatcgtttattcctccaattaatttgattttaaatatgaaagaaaggattatttataaaagaaaaagcagaggtattaacaggatctgcttgttaaatttaattttgtcaggttaaaatcacttcattttttccagtataaaattgatctctttacagaaaatatccttatctacgaattatgaacaaggagggggaaaacttgggtaataaaaataacccgttagttggtattggaattctttcgatactattaacaacaatttatacagcagtacttgcatcacagttgatggccactaaacacaaagttgattacctttattttaaaaataagttctctgaaaataaaaactagttctattgagacggtgattgaccatcgtctttttactattctttgtttacacaatatttatctgatgtgtcgtcaaatattcttgctatactttacctttcgatttcctgttcttcttttctcttcttgacgatgcctgtacgtttttgagggtacatttgattatccacttcaaaacgttcttgaaaagtaagaggttgttcttgaacttgaccattgatgatccccttttcctttttagcaatatttgaatcgatctgatgttcaagtttgtttagatgtgtgtctttggtgtgaagtttcacgtgtgccaactcatgtatcaaagtctttacattttgacgttcagaattacggggatttaacgcaacttcttgttagagtataagaaactccctttgcggaacctagttcttctttaggagcaataatagaaataccattcttttcagcaatagcttcacctgtaaacaaaataccattttattctatattttctttacctccggtagtttctctttctttttttcctttcagcctttggaggttgtaacagagaaaaaggattctttttctttgtttgagcgatccatttatccatttccttttcatcaaagagaagggatttatttgtcttttttttctttaaaataggtttctctttttctaggattctttcgtcaaataatgccatctatcataccctccttgtaacttttaaataatctctactcaaaatattagtaccacttacaaataatcaaaaagaaagagcacttttcgaaaaatataaacgaaaacatgctcttaattaaataaagtaaggatttaaataaaatatggatcatttaaatcattattattaatcactacatctgcgcttaattgtggttgatgttcatctaaatagatttttgacgctgcatgataccttttaataaacattttctcggctttttcatagcttccaaaagtttgctcttctcgtttggcccctcttttcctagctaattcaaagtcagtactaacgaatattttaaaatcatataggttgcataattgctttttaaatagaaaagttccatctacaattaaaatcatatcctcagttgctagttgaatagtgggtttaacatattgatctgtcgctaaatctaaagaagctgcttgataatgaccgttacccttaggtcctaaaggaattaaaagcttatgcttaaatgattcataatcatgggcatcttggtaatagccaagagctgactcttttccctgacggtaacgaatagatctcgagttatgaaaatgatctatacttgttctaatcacattctttcccctattttgaagttcctcagtgagttcattagcaagtgttgtctttcctgaggatgtaattccactaactcctactcgtatggggtgtcttgtttttaagctcaatactttattagctaattcagaaataagtttttttcttaacatgtgatctcctttccaaacactgatgcctttatttttctatctataatatgaataacctcttattattcatctcggtcaatagcacaatatatgctctttttccttaccaatgtaagtaactgttaaatcgatagtaggaatgatatcggctacacttttctttacctccggtagtttctctttctttttttccttttcatcaaagagaagggatttacttctctgtttctctttttcaaagagctttactgactttacttgctcattttttaatactttttcattgaatatcacgatagtacgtagcccccttttaacttttgaatagaatttgattaaattgttagtagtaacttgtagcaatagacaaaaagaaagaacgtgtttcaatgaaaacacgttctgactataggtttttatactatttgtttagtgaaaatatttgtttcttcaaaaatacaataactaataaaccatgtttcctttaactttctgtattatcacgtattaatttatcacgatcaataaattgaggaggtttctccatccaagaacgctcaattaacatatttgccccatcctcagcatagactcctgacttcataataaatttactataaagagctgctaaatcatgccgtatacttaaagacatcgcactcccatatgttgcaactccaagggcacacaatgcattcacaaaacaaagcataatctgctctgaataaggagcgatagtggagctcgtaacacacgtatcccaagtcatagaggcaggaatatcactttcatgtaacgttttatgagtattatagagaatatctgaagtgatttttgtgccccgtataaaatgtttttttatttcactatccttcgctacttgagagaaacctaaaaggacatctttccctagttcattattaagtgatgtcatatataaatgagaggtttccagtgcaagtagagatcgtttgtgcccaaaccatccggtcagaaatttctgttctgtcacaaactctacttcctttggataatccatgtaaggtggccgaataaagacacccttttccttcatgacttctcgtgtggcaccattaagcctaatagcctcttccacatagttatggaataaatcatggatatctttccgacaggctaatgtgatgccaccagcatgtgcagtcatcccaaatttactcatgtgtagaaggtaggccatataaaaaacatctgtaaaaagacgaggcgcattcaatttaacatgtttttctattggaaacccaacgggtttaggaatttcctcttgttgaaagatcgtttctatttctactagatgtcctcgagctacgttaattgtttcttctaaaagaggtttgacatctagatcctctacagtttgtaaaaaatgagttaccatacagatatttaaactatcattcatataagtattccacaggtttgagatttcagcgcttgtaagacgcgatactttattcatttctaccatatattatcctccattcatgtttatcttttacataaaatggcaataataaacgtgaaggctgagaattttaacttggactttccattcagaaccatcctatctaccagggatggttttttcttatttttaataagtacctttttattcttgttccctatcaattgcacaatacgtactcttctttcgtaacaatgtaagcaataacgcctcatacatccgttttttagggttcgtacttggtctaacggtcatcaatagcccaaatatgcccatgtgatgtagggtaacttacactttacagaagagctactttcacttgtactcccaccataaccggaagtttggatttcctcatgaagaggagcacttgcctttcctacagaagagctgcctccatttgtgcttccactttgaccaaaagcttgtatttcatcttgtaaagatgtgccttgacccgatccttttccgtctgaagcattcccttcactatttagcaaactactcaagacgttctgcaacgtcgaccaaacattgattatcattcatgaaacagaaaaaacaattgaacggatccagttgttttttctgtttttaaactttatatgttattcatttttagttaacataattaccattctaggtactaaaaaataaatcaaagtagccatctctaatagttgacaatttgggtgattattatataatagttttatgactttagaacaaacaaatgaccttcaaagagttaaaatattcaatgcattagcagatgaaaagagaataaatattattcgtatcttatctcaagaagaaaattgcccgcgatgtacagatattggaaggagtttagggattagtaaatcaaatggttcttatcatttgaaaattttatctgatgcacagctggtaacaattaaacgagaaggtgtaactaaatacgtttctttgaacactgaaatgtttaaacaataccttcctggatttttggctacattataaagtagctttttttttactaattagttttaaagttttatgactatttgattaaagaggagttatttatgaaaagcaggatgaattatctcattgtaacgttatgtttcattgttctatctggtgtcattaatgctattttatttaatatggctcttgaggatatgataaaagatttgagtgtcacgagttctgcaatcagttggattgttatttcttatacattggttattacttttggctcaatcacatatagcaaattagcttcctacattcagataaaaaaattattaatgattggtgttcttttattcgctttaggttcagtaataggctacttatctaatggatatattggagttctgataggacgtgttattcaagctatggggggcagttcttttattgctttatccatgatcacagcaaatcaatatcttcctttagctaaacgaaatgtcactcttacgttaataggaggttgtttgtctctaggttctggatttggttttttgatgggaggaatattaactcatatctggggatggccatccttattcttatttatgagcctgactttactcacagtttttggcctatactactttgtcccctctggatatgctggtaacgagaaagtaactaaaccctttgattttttcgggttgttttatttacttctctttgttatttcttttatcttaggagtaaaattaaatggatatttgcttattctaagcgtcctttctatcctcttattaaacttgcatagtaaaaaacaaggagtcttgttatttattgatttttccgtattccaatcttattcttttaacaaattaatcttaattagttttattaataatgcagccatggtagctattttgtttctttttcctttacaagccattcgaacatttcatgtatcagttatcctaattggtttcatcttatgtagtatctcaatagtaggctttttgattagtctacttgtgaggaaaactgttcattttataagtaataagaaattaatggttatatctattggtgtacaattaataggttttggcattctagtctttcttggtcttcattctatggttatgatcacactaggagtattatttatctatataagttttagtgctctaactgtaattgttaatattgaaattcctcatacaatagagaaggagaaaatgtcgatggggctaggggtatacaatctcttcaattttttagggatgtcttttggtccttccatatccagtcgtttattagagatgtcttcaaatcttaatttttccttctccttctttgcagggctattaatcctttcttttgtgttatctatagtaaaacaaaagagtgcggggtaatgctgcaatagagcagaagaaactaccttaaaaaaactaattgaacaattaaatctggtagttttttctgtttttaggctgtatatcgtatacattggtagttaacataatacctctttcagtacacattaaagaagagaaccctactggcagtagcgttaacccctacaaaaaaatttcctatatgagaaaagtatgataaaaatagcttatttcataaatcagatatttatgagctctactaaaagcaacctaaataattgtggttgctctttttttgcctatattatttcctcataatccctcttattttcttcaaaacatattcaaataatacaactgggaggtgatttttatgccagaacgcggtccaacacatgaaaataataatcatagtagtagttatgatactaatggtggaaatatccaaccattagatgtaccgaaatcaaatagtaaaaagattcctgctaataatgatggtctaactggaaaagtaaatgcaaacctaggctatcatcctgaaagataacataaaaaaaccgtcctacacaagtaaggcggtctttcatagattcattctatcttttttagagattgtagcagcgtgtaataaaaaagggagcaaccacgaaaaaaccacgctacagaagtaaggtggttctccgataagttttatcctatacaaaaactatatctatagtgtttctttttaatttgtatattataccatttagcaaaaaaagagcgattctaaagttactctttctctcagtaaaaactaacacaaaatgtgtgtattggtgcttaagaattgttaaataaagtatacgtttatgggctaataggcttttattttatagaacttccaagtatttaaggccttgttaaagaaaagaacaaaaagatccaacaaatttaaagttttccgacttttgaaagttattacattaattgttttttagcttgtaacctttaaatttatatccatatacatttgtaagatccaccaagcttttataagaatacgtaatggcaaccggtgtgcctacttgaactttatcataaagcttttcaatatctgcattatgcattctcacccaaccttgactcacgtatttgccaatgctgctttcattgttattaccatgaacaccatatgtatcaccacacgtaccatttgcacttccttcttttcgagccttgatataagattgagcaacagttttaggttttaagccattcatactaataaggcgtgtattctgcaaactattctcttgtatactccaataagaaagaagatcgattgggctttcaaagaaatgaatcttatttgggcgaccaacatcaactgaaaagcctgtatgtgggttatcgttcgttaatactttttaataagaacctcgtttattttttatcgaagctgttccttgtcgatctaccccaatgacttttcctttgccttcttgttcacgccatttaaacaccacattgtttcgtttgtcctgggcaattaaatctttttgaaggagccagtcaactaatcgaggatctattttacgttcttttatgagatagtcttttactttgctttgaccctttacttctaactcttttggatagcgaaaaggctcttttgatggtgaaaccgacagttgctcatgcgactgagaaagctctttataatcgcctttggtgatatctaatacggcttgtggaaacgacatcctataatacattcgagcgaaactaatcgctccatgtcctgtttcattccggctgttccaagcgtacatatttcctttgatgagtaagccaaatactttccttcttttacaaaggttttgccttccagatacgacaacaaatcaacatctcgcactttcatgatttccccctcattgacgtgttttcgttctcccacctaatccctcctcacttcaccatatgaaaaaagagagcttttcagttccctcgttcttttacaatttttttcattttttagcgttctatttctttcgtttctttccgttttttttgaagagtttgctccattattccatgcggaaaatttggtgaatacattttgcagcttttcaccactagtattagcccatattgcataagaaaaagcagaggatactgtaacctctacttttttgcatttaattttattaagttacatgtagatagtggataaagcttgttaattttgaagaagaaacctttaactagctcctttattctctacctgaagcaactgatccatattccttatcaggtagagcaattatatctgtatgtttaggtatatgacccaataaacgtaacatggctacaatttgccccttatggtggaactcatgtgtaattgtatgcatgagtaattgtcgaggtgtctttcttatactaccaacctctggtctccaaacaagttctctctcaataatgtcatcgaagttatcactaaattgttcgaataaagcatctacatatgcatctgcttggtcaaagtaaagttgaatatcacttatctgcatagtattgattacttcttttgttaaaagaggcgattttgcttgtaaaagaacaaaagcgccaagccaagcatggtagcaacctgcaatatgaatcaaagaatctcttacactctgagaaccaaatcctagttcttttgtaaaatcatcatcatttaactccttacattgtgctaataagatttgacgtgtttgctttacccattcgtactcttgtttttccatactctctactcctttatttgaatattcccacttatattatatatgttcattttacagcaaataagaaaaaccaacactaatagaaatttagagaatggatgtacttgtctttttttcttttaaaataggtttctctttttctaggattctttcgccaaataatgccatctatcataccctccttgtaacttttaaataatctctactcaaaatattagtaccacttacaaataatcaaaaagaaagagcacgtttcgaaaaatataaacgaaaacatgctcttaattaaataaagtaaggatttaaataaaataaggatttaaataaaatatggatcatttaaatcattattattaatcactacatctgcgcttaattgtggttgatgttcatttaaatagatttttgacgctgcatgataccttttaataaacattttctcggctttttcatagcttccaaaggtttgctcttctcgtttggcccctcttttcctagctaattcaaagtcgtactaacgaatattttaaaatcatataggttgcataattgctttttaaagagaaaagttccatctacaattaaaatcatatcctcagttgctagttgaatagtgggtttaacatattgatctgtcgctaaatctaaagaagctgcttgataatgaccgttacccttaggtcctgtcctaagggaattaaaagcttatgcttaaatgattcataatcatgggcatcttggtaatagccaaaagctgactcttttccctgacggtaacgaatagatctcgagttatgaaaatgatctacacttgttctaatcacattctttcccctattttgaagttcctcagtgagttcattagcaagtgttgtctttcctgaggatgtaattccactaattcctactcgtatagggtgtcttgtctttaagtccaatacttcattagctaattcagaaataagttattctatacatatttagttaacataatacctctttccagtaatcaaaaaagcccttggaatttgtttaaattcgatggtcttggaatatagcatagtcgttattatattacatttggtttcgatctatcttttttcctcaaaccattacgaatcatggaaactaaaaacattaacaagggtataagcagatgaaaacccatgaaataatagtgcaaaatatcatgaccttcctctaaatgttctgaaaaactggaggccatggtcatggataaaaagatgacaattcccccgattggtaaaagaatttgttgacgattgtttaacttgaataaatccactattccgatgacggccccatacaaaaagatagagactttaaaaaacaccgtaagcaacatcgtaaacacaacaaccgcatcaagtctttctataaaatctaaaaggttcacctttccaatggttactaacgttggaaaaaccgatctctttgttacatcaacactaagaacagcaatatttaagcttgctgtccaacttaagatcagaccacttgaaacgatggcagatagccatactcttttcactaatttaggtctgtttaaatgaggaagcaacatcgtaaaggcaatcatttcaccaaaaggaaaaaagaaaacgtctcgaaaagccacctttaaaggtagtttccatccattttcaagaaagggctgcaacttatgaaaatcagcattccctgaaataaaaataaagaagtttcctgccatccccaagaacagcaagacaacaataaatacttctgctgttcttcctaacacttcaatacctaaataaagaacataacatattacaagaaccagtgagaaattgacagctaataatggggtctctgtcaatgttgatgagactagtaaatcgccaaagtcacgtgcatttctagcagacatatacaaaaaaattaggacgtataacaaaccaatgatccatcctaaatatttaccaaatattttccttgcatatccagtaagagggagagttgaatattgacggaataaagagtaatagatgaaaaataaaaccatccccatgcacatccccaaaaggatagcaagccaagcatctttttgtgcgtttattccataagctacgattaatgcagttcctaggttgaaaataaacatcatggcaaataattgaataacactaactttggctttctccattgtttaaggtatcctcctctttatcaattacgtggatgagtatgtatatgtttattaagtgagtgctgctaaaatacatttagtctatttattcatcctatcctactttctatttttaatacttttaaggggtgagaaatgcatactatatgcaacgttagtttacataaacattcttataggtagttataacaaataaaaaaggtaagccattaactaaggcttacctttctattaaccatgtagttgttcgtgagtatctattttttccttttgcaaaatcttatgaggttcaggcagtaacaagtttaaaatagctgctcctgctaagatcataattgaaagataaaaagaaatattataactacctgtttcgttataaaataaacctggtaaataggcgcccaatgctgatcctatttgatggctaaggaataaccaccctaaaataaaaccaatggagtattctttaaaatattgggtagctagtaattgagttggagctactgttgcaaagtcaactaatccaaataatactgcaaaaataagcaacaatgcagaattatgactgtacaagagaatacaaatagatatcgccctcattccatataaaaggaataacattttgcgactactccagcgatcagccacaacaccagatagtaagatacctataatattaaacccagcaagtatacttacggcagcactagtaacacttgttgaaaatccgtgatcatgtgaaaaaggaataagatgcgtatccattaatcctgtagtagtgaaaccacaaatagcaaaaggtaagattaaaaaccaaaactctctttttagaaagacattccatattgaagaggttgtgtttaaagcttttttttcgactgtacctttaccttcttctacgatttcgcctccaataggaactaaacccttctcattaggatgattccgtaaaaataaaaggacgataggaaagacaataatcactaaaaaagcgcctaatatcacaactgtcattttccaattaagccaatgaattaacatgagagatcctgggacaagaagcatttgtccagcaccaaaaccagcttccataattccaaacgcaagtccacgtttttcgttaaaccaattggtcacaaccactgttgcggccacattggaggctcctcccacgccgagagaaaccataattccgtaaagaaagaataattgccagggatgagttacaaaagatgtgagaaaaatacttatacctactagaaaagtgctaaaggataaaatgaaccgagcacccaatttatctacaagccttccaacgagtggttgagacagcccataagtgataaaactcaatgttgaaataagagaaatggttcctctatccattgagaaatctgtttcccaaggctcaacaaaagctccaaatgaaagacgaacaccttgaacagctaaaaaggtcaaaaatgtaacaaaaacaataatccaagcgtaatgaaatgttcttttcatatattctcctcaactaaaagtgattatttttccctcagctctaaatcccagcgttcttctattaaagtagctccccacaaggattttttctcttgcacttcctttatttcaaacccaaatttttcatatagtagtctagctgtcaccatatcactaacggtccaaagaaaaaggcgttcataatcaagttctttacagtattgaactagagagttaataagttgactccctattccttttttgtgaaatgacggatttactaagaaccatcttaactgtcctaccttattgccatcattcactaagccaatacagcctgcaaactcgcgatttatttctgctatccagattctttctatatcagcattaaaggtctcctgaagatatgataaaaagctgttatcccatttatgtacttgattataaaatagccattgttgttcaatcatgttgttaatatcatcagaggtataatagcttctaacagaaacagcttcttcgcctttttctttaaatgacgtagaaagaatttcttgtatggtattcattgaggctacaagcttttgttgttgatcatggtccaagcttccaagaatatattctacttgctgattagcttttttctccaattctttataaatcaattccccataactggttacatataaaagatgattacgtccatcgtctttacacttttgcttataaatcaatttttctttttcgaattttttgataattctacttacataaccgccatctaagtctaatctttcttgaatgtttttagctgtacaattattagtgttataaatttcaaatagaatacgagtttctgttaaagaaaacggactgtcatagatatgttcatttaaaaagcccaaaatatctgtgtaaaaccggttgaacttcctaaattcaaggccacaattactctgtacattgatcatttttacacctcttttaaataatataaacgtaattatttaccaattctaaccttaacacttgcctaagtcaactattttccttagattctattcttttaacaaaggaatacgatatacaaacttacccaacttaattagaaaagggtaatctattaataaagtataagtgacaagaataggtaagttatgttaactgggcgcgaatattttgaagcactagaggtaactaaattctattcttctctcccccataggtggtataatatggatgattgtattagtgaaaggggagaaagagatgaacaaacttgtattcaagcaatttgaaattggaagagagtacttcctcaaaatcataggagctgtttcggaggatcaaactgatgtgcagccagatggttttaacaacacaattcattggcatacaggtcacgttttgacagttactgaacaaactatgtttggttttcctcatgcaacaacccatcttccagcaaactatatggaattgttcggaaatggtacgaaaccagccgattggacaggggatgtacctactgtggaggagctcaagatccaactaaaagaccaattggctcgtattcagcaaattcctgctgaacagctaaacaataacttggaaaagccatttctgggatgtaaaacctttggagagctggcgggtgttacactgatgcacgaagcaactcatatgggccaaattcaggcaatgaagcgaataattgaacatgtgggtgtaaaaaattgaatttttaaaaatgatataacaaagttatcggaagtaataaagcctatatattttttatataggctttagcagttcatcgttatattgaagccgaaactttttgttttcttctcaagtttaagaagccagaagctgttaaaacgcccaaaataactaaccacgtacctattacttgaggtaaggtaataagtgtaccagttaaaatagaaaggatcatagtaacgactggaactaaattaaaaaataaagatgtattacttgcaccaatcgtagccattcctttattccaccatagatagcctaatacacttgtaaatagagccataaagagaatagctccccaagctgaccatgtaacgtgagacaagggctgagggcttggtgaaaaagctgttaagatgacaaggcaaagagaacccacaatcattgtataagtagttgtctccattgaagaactaccattcaaatattttctccctaatacaccatataaggcccaacataagttccctgctaatattagtaaatcacctttagaaatagacagtgtttgaataatttctaatgaaccttgcgtaaggacaagaataacgcctactaaggcaaaagatatacccagcatctgttgttttgtaataggattttttaaaataaaataagcaaaaagtgcagttactagagggttagttcccatgatgagagctccgtttaaaggtgaagtgtattgcattcctaaaaagaaaaaggcattgaacccaaaaattcctatgatgccaagtaagatatacattttccaatggatcttaagggtttttgactttatttgtttttgcaatcctaatatcagaaccataacaagtgcagcaatcccaaaccgccatgcggcagcacttgcaggcgagaaatagtgaacagcatatttagccaaattgaacgtagcacctgtgaagatagcaaaacctattaacataaggtatattctacttttcatctttcaaatctccaatcattgtttcatacgtctctaatttctcttttgtcagattcataactgtttcaatctcttgtttttgcctttctagaagaagtaagtgtttgtttaaaatatccgcccttgtttgaaccttttttaattgaatggcagcagagtcgatgttttctaggagacatccatcctttaaaaattcctggatatcctctaaagacatccctgtttgttttaacattttcataaatttgagaaggcgaatttcaccttctgtatatcttctttttccaccttttcttaatggtgaagacaataacccaatcttttcataataccgtaacgtatgagttgtaaaccctgttttcatagcaacttcggatatactatacatttccatttcctcctttctttacatgttacaacttagagttagctctaagtcaacgattaatttgtaaaaaaagcccagattttttctgatcctcttagtttaattaccataatgtgacttctaggcaccaaaaaaggctttttttagaaccttttttagtaattaggtatagcctcaaaggtgataatatcttcaatttcatactcaatatataaaatctcaagattaatgagtgaacattagaaagagcaaattaatttaaatttaaagtgcctttattcggataatataataaataaactaggtttaattataatctggtttattttctatattgtaggaggcaacaaaaatggaacacggtaaagtgaaatggtttaatgctgacaaaggtttcggatttatcgagcgtgaaggtggagaagatgtgtttgttcatttctcagctattcaaggggaaggttttaaatccttagatgaaggtcaagaagtgacttttgatatcgaacaagggcaacgtggcccacaagcgacaaatgtacgtaaagcataaaaaaccatcctaaaaacagactctaccttcagagtctgtttttattttaaaagtcctttttaccagaactcattcaatagtaattgttattcatgtttcattaattcttcttcaaagaaaaaagtaccaggatatttatcgactgtataagagtatcttttcatgtttttcacataatgactttttaaaactgttactaattcattagattctcttatagctactacttctccattagtaaatatactttgactcatatcctcatccctctaataccagaaataatatagtttttactttcaattgtcttagagataattaaaatctcctaagattctttatttttgccaagttcttttgtacggtattttttagtccttcacaatcataaggattaaaggttagtggtttttgacaccttacagcgtaataaatctcgatacctgctagtaaagcataccgttttcaaacaacaaaagattattttctataattttttttacggcccactgtctcttttctacctctacctctcttacgttctggtcttacctttttattacgaagtggtgccacttcagtcaattggacaggagccatattcgattcttttgttaagagctttaaagtagctgacaatagggtaacagaatccatctcttctaataacttttccgccataggtttatattccccaaactcccccttttcgatggcggtcaaaacgcggtgaatgactgcttcctgatgtccagccattacttcactagaagtgggtggtgattgtctagacatttttgttttcgtgacatcttcaatcacttttaagtgatgacgttctctcggagttataaatgtaacggccaatcccttagtacctgcccgtcctgttcgaccaatacgatgaacatagctttcaggatcctgaggaatatcaaaattgtagacatggctgacacctgtaatatcaagtcctcttgctgcaacgtcggttgcgaccataatctcaatggtatgctctttgaattgacgaatgacatcggcccgttttgattgggtaaggtctccgtgaatgccttctgctgcatatccacgtttttttagcccttcggcaagttcatccacacgttttttcgtacgtccaaatacaatagccaggtctggtgattgaagatctaccagattgcaaagaacatcaaactttcgattttctggaatttctacatactgttgctcaatattctttactgttaactgcttcgcttttacctgcacgagttcaggagtgttcataaatttctgtgctaaactttgtacttgcttggacatggttgccgaaaatagtaaagtttgatggggagaagagatgccaccaagaatcgtttggatatcttcaataaaacccatgtttaacatttcatctgcctcatccagaacagccgtacgaatatgatttaaacgaatggttcttcttttcatatggtccataagacgtccaggagttgctgagataatatgaggccttttcttaagggccttgatttgacgattaatgtcctgccccccataaataggtaatgttttaactccttttacctgtccaattcgatttaactcttcagctacttgaatcgccagttcacgcgtcggcgctagcacaatcccctgaattgcttcttcagaaagctcaactcgttctataagggggataccaaaagctgttgtcttgccagtacctgtttgagcttgaccaattagatctttacccgtcatagctataggaatagcttcagcttgaattggtgtagcctcttcaaaacccaaattatgaatggccttttcaatgttcttacttaaatgaaaatcagaaaactttttcaagggtttcatgctccttttcttatttaattcagaaacgataaaagtactcttcaaatagagatgttgcttattcatttctgcgtagtgtaaatcaatgttattatcaatggaagtcctgttctaacgtatctgtacaagaccaattcatgccttattttatccacgcttacgtgtatttataatttcttatatgacctacagagaaagaaaaggcagccaatataatattagctacttttcctatttataacttcagttttcgttaaaatccttgctaatataataagtataagaagcactaatttgatattttttcttacatgaatttttctactctgagcaaactactcaagatgctgagaagtatctccaatctataatctcattaacctatagaaaaacttcttatagaaatagggagtttttctgcttttcaatttgtatatgttataaatctgtagttgacataataacaatatcggaaatgaaaatatttgggtattttactgctaagcactattcttagaatttattttgtagttcatatgttggctaatttgtcacgatcttcagaaagtgggggctcctctaaccagccattacttatcataatcgttgcaccatcttccgcatatttagcaatttctgcagataaacgaacataatggacagataaatcctttcttgtgcttgttgccatcgctgtaccataaaagcctacactaagaccaatcaaagctgtagtcataaacatcattaatttgtctgaaaaaggagcaatttttgaatttgttacctcgttatcccaagacataggtgccggcaaatcattatcttttaacacagaaccaaatacctctgtatgtttaaacgcaatctcttttccacgcaccataaactttcctacttccttggactgagcgacttgactgaagcctatcattacggctttccccaaagcatttctttgcaagtttaaaaagaggtgtgtaatttcaattgctgataaaggccttttgtcaccgaaccaaccagacataaacttttggtccttaacaaagcttacttcttgagatgggtttaggtatggagaacgaatgaataaaccttttgataacaataaatttttagttgcactatcgaactcactgagttcaaggatacattcagaaaagtatgcatctatatctgaacgtacagatactgtcttcgcaacagcataaaaattaagagccattgcccccatactatagctgaaatataacataaagctatctgaaaacaattttggagcagaagtatttacgtcatcttttactacaaacccttgtggtacagggaatttttctttatggaaaatggtagttagtttttgtaaatgcttttccgttaattctaaacccttagctagaattgattgtacctgagtatctcctaccacttttgaaaaataggtaaataagcagtgacacatgctactattcatgtaagatgaccacagttgagcaatctctgaagcactcaatttaacattatgttcggtttccatttacttatctcctcacagatttaatctttttttagtatgtgaaatcaatctataagtattcttaaaatgctcactttcattttctagaagagagattttctactccctcagatatctttttttatttgaatgagattttattttgtgggcaaattacaaaaaacgtcagttaactactaccactcaaaaaaagttatgctttactgtacagaggtaatctttttctttcctttatgaaaaactcattctatattcaaattgtaacttttctcataaaaaacattagcctaaagataattttacattcaataatatacggtattccaggccaaaaaggaaaatacaggatatgataggacttattattgctattattgcatttaattttattgcatttactacaaataaaagattaacaggaaatcaaatttttcatatttggatgtttaccattgcctttcaacatatgtttgatgtttttatcgatttgaagtatcacgcctactggtattttacaaaacatgctgattggaagggaatccttgtccatactgtactgcttccacctgttaacatgatgtttcttaattggtacccctttaagaagccaattatgaaaaaaatttgctatctaaccttttggttagtaggtattttactttatgaaatgattacactacttcaggaaccctgggggtactttcactatggctggtggaatttaggttattcagctattattgatcctatgctcctactcattatgttagggtgttataagtggatatgtaagttggaaagaaagttattagtatgtaagaaggcaaaataagattctattatatgtactaaataaaatataaaattaagttattaagaagtactacaacaagcttattttcaatatggccacattgaaattgttgattcagccgcaaaggggaaaatatggggtaaaacacccgttgtttttttaaaaagccgtgcacaagattgaaaattgaccttactatataggcaatatctttgaaggaaatccgcaaaaatcattaggggaattgttatgcgtgcaaaactggaaagcccaaatatgtatggatgtttaaagtgactggataatttcatacccatgagcacaagtgagactgctgctatgtaaaagaacagtgcctaaaagaggacaaaaacaatggggatctcttctggaactttgagatgaagactcaaaaatatcaccatttttttctagccaaaaaacattccgcgagaacaattagcttgacaattaatgaagaaggtattgaggtcatgctagctatgcggtggttaaacaagcaatagaaactcaaaaaagctagaagtttaaatttttcctttttttaaatgagctgatttatagtgatgtattatatacgaaattagtttcatgatgtgcattatcagtactatagaaaaacacccctagaattataactctaggggtatcttagtaacaattacttagatagaataaactttatttattttttcaaaacgattgtattttcacaaactcacttgtatctacacgtatagagaaaatgcctcaattcctcctatagccggttctgttctagatattcttttaatgtttgctgtaatgtcccttttgcttctgccttgtcctcaaaggaaattcctgagtgaatcatggtcctaactaggtcagcacgtaaacctgtgagaatggcttgacttcccatcattgaaatgccggttaatattttttggaaatggtcaataacatgcatctccatgttagcaattccagacaggtctataattaatgtttgaatctttaaatctgagatgcccatcaacactttctcctcaatcgtttggatacgattgaggtcaatcatgccgatcaacggtaatacagctacagattggctaagtggtataatgggtaccgaaagattttcgactaagtccctttgagaggcaattagttcatctttatacttggaataactaatgagaaaagtgttaagaaattgatcaatccgatcattaattcgcttctctaaggcataaaattcttcacggctattaaattgtttatttattcgatcatattgatagagaaaatgccataatgttcgcctaatggcctgtacccattctagtttgaaagcaagagttaaggcgtgctctgcccaagctaccccttcttgttgagcgaaggcaacgagttgttcttctttttgttctacaacatatagagacaacttttgagcattcttcaaaagatcaatattgccagtttctaaaatgtcgttaattttagaggctacgttaaccgcctcagataagagtttatcttgaaaattctgtttgttgtcactaataaaatcggtcattttctctctctgattataaatagtttccattttttatacaccccttatttgttcattgattaccgttatccttagttagtatccctaaatgaatgattatcaatttttattttcagtctttgtatataaacgaacgtcttccttctttgtactaacgccaattagatatgtttttagataaaaaccaacagagcttttataatgaatctttaaaactggatatatccatgatcttactcattttttcaacatgataagaggttaattaaggtcatgttcgctaactgatacccatttagagagttcatcaaaaatgttctgaacttgttctttatttaacgtattaacattctcccatgcactagaaatataagtctctagatagtttggataggaaatggattcagtaagaagggctttataaaacaaaggcttaccacctttatctacttcacctttatacctatagttttcaaatgtccaaccctcttttgtttttttaaactgatacaggtccttatgtccccactgagggctataaattcgcattttgaatctagatgcactactcaattttagatacctcctacctcctcaaaatataattttaaataagaccctttatatttttaccctcaaaacatgtatttcaaatccaccttttatgccatatatatccttagtttccacctatgttacgtctctcatataacatctaatctccatgaaaaattacattcttttgtttttttacaaatttatttcatttttgaaatctttatttcaattatgggaggtaataacttataaatataccctatgttaaaatagattaaactttaatttgcaatatttctttaaatagtgaaaagggggctcagtgatagatgacaataattaaaattaaagagatgttagaaactttattacagtatgaagatagtgaaattattcataccatttatagtgtacataataccttttcccttagctattctaaagaactaaagacctttcaattgaggaatgttgaaacgggtgagattgaacgttttacagatgtggagactacatctatagctctgtataaaataataagtactgggggaaaaaaggtcactgagtaataaactatctttaaggtttagataatgaacttttttaaaaaagagactacatcatttagaaataggctcttttagatttgaatatataaattcttttatttctacaattgaaagacctaattgataagcttccttcataagactaatccattcctggtcaagcttattctcttcttctagcacaccttcctccaaccttcttcattcagatttattagatttcaaaatttaacaacaatacattagaaattgatactatttattcaacatatttcttcttatttcctgtaatgtaagtctccttatataattaattaagacttaatgtagaaaaaagtaaatttaaggaattattattaagactttgagcagactaaacaagacactgtgatagagtcatttacgactacaattcaacgaataggagaaggccatctcttttgactgggaagaggtggtctttttcttcttttaaattgtatagaatgttcattcttagttaacgtaatcaccattataagaaccaaaaaagccctcctataagagggcttttttctatatctttatttattaaaatatgtagtagcacttacactgaatgtttttactttatctaactctttttgagggatttcttgagaagataaatcaaatgagctagaatctcctggttttaaactgtcttttgactcaccaaatgctgtacctataaattcatggttcttaccatacattccagcgcctatcatcgtatattctgtaaatttttttgtattatttctaactgtgccaactgcataaattgtttcatcatcttgtatatctttgttaatttttacagagtttttatttacttctaattttaatacatcatttgcaggctttacgttaggcagcgtcattttaacatcataattcttaaacttagtaagatcagtaagagcttctgctgaaatatatgccttctcacctggttttaaaatatacggagctactcgaactgaggcttcaatattatttttatcgacttgatcttttttgttgatataatttatcttcaagtcattaatgtttagagtttttttactttcatttttgataatcgcagaataagtaaatttaccatcatacttatacgacttttcttctactactttaatgtcttgtttcttttcttcgttctgtttttcctttgtgctatcactcatattatcatttgtacatccggctactgccatgacaattaatagcatccctactaaaatccttaatttcacttttattcctccatataactattattggtccaaattccattataatgcttttatagggatatccaacaattaaattctttgcttaagaataaatctattccttataaggatagatatctagttaccataatgtaccatatcggtaatagcacaaataactccgttcgaataaatcgaaacagagctacaatgagtataaaaatttcctgattaattacagcattttatatatttcaataagattattatctggatcccgaaaatgtgcaatacgtgatctccattctttacgatcgtgtggttcagtaacaaattcaatcccattttttctcagataatcataggtcttatcaacgtcttctacttcaaattgaagcaaaaaatttgatgtggattctccatctgaagacttgttttcctttccaattacttctgtcatggccttctgagataaaagctcaattttcgtttccccattattgaaaagtgcatactccatttcttcttcataccaacttattggaattctgagtaaatctttatagaattcaacactttttttaaaatccttaactaatagcctaatttgtagcagcttcaattcaatctcctcctcatggtataattctctctatttatcaaaagaccttcgtgttttttcattcgtgtatcctacacatttttagttaacctaatagaaattatatataattgtcctttcttaattgtaatttttcaatttttctagcttgtctatgtctccattaactattacatcaatatgtgcagaaataatatcgatagttaaatcccaccatttaatttctaataatttattaataatttgttttgggaaacgttctttgattttctgtgcaggatttcctccaacaatcgtgtagggttccacatcctttgtaataactgacttggctgctacaatggcaccgtcacctatattaattccgggcgtaatcaccgtgtccattccaatccagacatcatttccaattatcgtatctcccttaaacggcaattgatctagcgttggggtatgtttttcccaaccttgcccaaagatattgaacggataagctgagaagccatccatcctatgattcgctccattcataataaatgttacgccgcgggcgatagcacaaaacttccctataacaagtcgatcaccaaagaactcataatgatacaatacttgatcctcaaaggaatctccctttattgcatcgtaataagaataatcacctacaataatatttggcctagtaattgtattttttatgaattgtacaacatcatttcctttaatcggatatttctctgtaggatctgggccgtttgttttattcgattccataaatattcactgcctctcatggattttggacaaaactcaatcgacctaacttattacattcctctgcgaaccataaggcatgatcagatccgactgcaataccatgtggttccgcattttttgtaggtataggatattccgtaattttcccattcactgtaatacgccctatttgattgcttccccattcagtaaaccataaagcaccatcgggacctgttacaattgcatgtggacgagcattcggggtaggaatagcatactcatttataactccggaagtggtaattctaccaatcttattgccgttaatttctacaaaccaaagtgcctcatccggcccattcgtaatccctacaggcccagcttgtgctgtaggtaactgataggtagttacttctccttctaacgtaatacgccctatttgattactttgatttagagtaaaccataaagcatgatcagaacctgccacaataaaagaagggtaggaagcagggtgcggtaggtcatactcgattgtttcgcctgatggtaaaattcgtcctattctatttccattcatttctgtgaaccaaatgtctccgtgatgcccttcagttattccaaaaggtgctgaatctgggtttggtaggacatattccataatctctcctgttattgttagttttccaattttattagctttattttccgtaaaccaaatgtcaccctgagtcgtagaaataatggatagtgccccagcattaatagtagggatattaaaatgctccaccttaccctttatagtcattcgcccaattcgattggttttgtgttgagtaaaccaaagtgcgccgtctcttcctgaagtaatcccataaggtcctgaatctgcatggggcaattcgtattctttaatttttacattcaaataaattcctccttttctttatataaaatctttttagtaattcgttataagataattagattcctctcaaagaagtcttttataagacgagcaaagttagttaatataatagagctctccggaagacatgtaaaagaaaaccctttggcgtagaaggattttacctttgtaagttcaagtaagatagtaatagtgacttataaagtaattgaagggtgcagaaatggagggaagtaagttgcctaacagggagtatccatactattttataaaggtaggtacattatattacgtatatcattcgtataagaacgtaaaaaagaaagaggtatccagttacgaatttactaatgatgaatcgttagcatttcccattgatgaagagtctgctaaacaattggcggatgaatgtggaggtcaaattgtaataaagaatgctacgtttaatgattatattagccaaggagaaagatgaagtcattttatagatagtaaaaagaaggacatatggagaatctgtatcattaattgaatgataaaaccttttaactactatttattttgaagaaaaacttcttatttgtcgccattaagtgtaaatactaaaatcttaacaatacataaaatgatttaatatttacttaacttaagaaaaggttttaaaaaggttatcttctaaaaacagattcggtcaaattatttatttttaaagttatatgtatatgaatctacaaatctggccagactaataacgtattccccctattccgataaatttgaaaaccctttgcctatatgagcgaagggttctttttttatgtaaatatttatcaaggcgcaaacccttgaaaactgacagcgagatagataccaaacgaaagagcatataaggaaacaaaatgtaatgttaaaaaagggattttctgtttacctttgataaagaaagaataaataaacccgagtattgtaactaaaattaaaataggcacaataatcttaatcacagtaccaaaaatatttgctgtaacaactgataaaagaaaaaatgcaattataactatatataaagttatcgatatgactaaagaggctattgatacctttaaagcatctttaaagaatttctccatctaatttcctcctatttttagcaacacatattcattataatatacagtataaaaggaaataaataccttttttcttggagcatgttatatttctaggtagcagaagaaacctatagaaaattctataggtttctttaactatctgggctaataagttagcttaaatataattatttaccattatgttgattaggattatacattccattttgaactatataatattctatcacttggtctaaccatttttcttcttcctctgtataaggagaggccatcatactttgaaaatctcctatttcctcattctctaattttccaaaggcatgcatagcctcctcaccaacgtatttaagagatgcctgcaaatgcttatttgccaactcttgtacttctggatcatgaactggttttccaactaaccttttcacttctctcgataaatcaataaattcttttcttaatactataatataagattgtttgaaagtgaggtgattaatatggctagtgaaattatcgtgagccctggccctggaaacccaattcaagatgctattaacgcagcaagtgattatgatactatccgtgtattaccaggtatgtatacaggacctattgttattgataaaatgattcaattactaggaactcaagccggtattgatgctagaacaagatctggtacacctagcatagaatcgatcataactggtacaagtggcgttggccttgttcaattgacagcaaacaatgtagtagttgatggatttaccattcagggtaacactgctggagctggagcattctctcctgcaaccttttctggttattggttttttaataatattgtacaaaataatgttattggttactatgcaaattccaatggagtaactgaaacacaaattagacaaaatctttttaataataacaatcaacctggcgctgcaactggaaatggaatctattctgatcagggaattcaaaatattttgattgatagtaaccgttttaccgggccacatgccaatgcatctatcaatatgattggtccgacggccaccgatattgttattacaagaaatgaagttctcacagataactccatagctttattcgataccaccaatgttgaaatagcttgtaatactgtaacaaacacgtaagggagctctattttctttggaggcggaactgaccgaactgaaatttacaaccatatcctacaaaacagtatttctaatggaatcagtgttcaggacattggatttggttctaatagcaatatccgtgcaaagaataacaatatacaaggcaataatattgcaggacttaatatcgggacaggagcatatgttgtatcgccaagagatttagatgctaccaacaactggtggggttctccagacgggccttccggagacggaccaggttccggtgatgctattctattaaacggaaacccaccgaccataattgaatttactccctttttattagctccacctatcccatgttcatccgatattacatgtcaacaagcacttgctgctgctcaacaacaaattgctactttacaacaggcactttttatttgtcaacatgaatttgaattatgtagagaaaaaatagattgttgttgcgattgctgttgcaaatgtgattatgattgtgattaattttaaaaaataaagcttatataaataaatcttttgagcaaactactcaagacgccagaaggcatcaaagtatgtatagcacatattgataaccagaaaaatcactgacggaaacagtggtttttcgcttttttaggctgtatacggtattcatttttacttaatataatggattttatcggaaataaaaaggtatccctatttgctaagagacaccttactgtattttatagaaagctaatcattaacaatcagtttttttagacttatgaagaggaggtggaattaaccaacctttttctttattaagtcttaagaactttccaccaagagctactttttgcatatgaatttgtgcaaacatggctgcaatatcttcacgaatagattgtccaatcaattgactacacgtaactagaccagcagctatattcattgaaattgctgcagctacttctgggtcttgaacacgtgcacccactgggatatcatctaaacaagcttcaggtcgttcaggtggggttggcggtaagcctactccattttcttttaacaatgtttcaatgctttttatttcttgctggcactgttcgattgtctcttgtaccaatttatgtagatccttgtcacctacatgatttagaaatgtttgatagccagacactaacccttttgaggtagaaacatacgaccacgttccaaatacctccccataatgcatcggttcatctgtaggatttccacttaaaatacccattgttatcctccttacaaaattcatgatagtgtgccaccttccttgctatgcacatgtttaacgtctccaaattttgttttattattcttctacttctatcgaaaaattaattaatcaaagaatataattccatatttcaagcaaactaaccaagatgtttaaaagggcatcgtccactatatccttgttattaaacccaaaaaaactaccctataggtagtttttttggaattgttggagagattataaattgtggctctcatcacagctatttatctctactcattcaaaaaaatagatattaacgaactttttcttcacgatcatctcttcttttaagaccaaaaagaccaactagtcctaataatccaagcaattcccaaggtgaatcattattatcatccgtatcagttgctgtagtgacatttcgagtgtttacgtcattattataatttaagtcatcattataatttgctctatctacgttattattttcagcattaacaggtaagccgaaagtcatcatagctaaagctaacgtacataataaaacagaacatttctttttcattgtattccctcctttctttattaaataaagtccccccatcacgaaatcctattctgtaatgacattaagcttatagactgtatctaaaaatttcatgtcacaagagtacagtaatgagtaaaatttcatattttaagcaaactactcaagatgcaatgaggcatcactcatgaaacccaattacgtaacggaaaaaacctatctcttttgactggaaagagataggtttttctgtttttctaatgaattatgtatacaaccttagtaaacatataacattttttcggaactcctattaaaagtaatttatactcagttcttatacagacggataattaatagtattttgagcaaactagctatatgtagaatttctaaaggaaatccacctctgacaaatcaggtggttttttcgttttgatacatacattattgataacttgagcaaactactcaagatgtataaaatcatcacgactaacttctaattgcgtcacgaaaaaagctattggtccctgatgagccagtagtttttttctgttttcaataagaattaccaaaacgaaaacaccctgactatattttaaatagtcagggtgctttccctctacttttgaaggtttagtcccaaaagaagattagcttttccgagttctatagtatatgaaaatcagcagtagttaagaaccagtatttataatacaaaatgaatttgcgtaaactatctacgatgctataatgcattaaataaataccctattttttatattaacgaatgaaattattcttctcgaacagactagccaagacgccgtaaggcatccttttcttatttaagttcttaagagaaaaaactccataggcgatcaggagtttttttctgtttttaagctgtataagatatacacccatagttaacataatgtcctctacattatatacctaagaacttcatcaatgaaaactttaaaatagtaggacaaacacacaaacaccttttcaattaatgaatatattaatagagaaaaaatagaaaggtgagtgattacaataaaaaagtattattgggactataaccctgaagatgatagctattatgtagatgaatcatatccccaatacagcaataacaatgctcatagaaagaatagagaaaaagaacatgagaagatttgttttaatattaccattcacaataatctagcaaatcaaggtggaaatgctggagttaatgaaaatgcagaaacaggcggacaaattagcggaaatgctggacaaaacgcaaatcaaggcggacaaattgctaaaaagggcggacaaaatgcaaatcaggaaggccaagttgccagcaaaggtggaaaaaacaaactaaaagaatttaatttagaagaagaaatggaagacgagtaattcagtttatccaataaataccttttttagaatgtattttctatacagaggtatttaaaaatttgtacaagcaaccccttttattttcatctaatacagagaagaaaggaggtgattagcatgagtgattttagtaaaagtaattataccggtactggtgatgtatctatccctcagcctcctgacattgtaactatcctttggcagcgcaatcctttagttatacgagttccacgtacaattgtagaagcaactattattggaaacgctagaccatgtcaacggttattacaaacaggtgacagttatagaatggcagtaaggtgcttacttgataacggatttgaacaagtatttagtgaaagattaggtgtatttggtgtttctgtatttgttcgtgaatgttaaggaatcattttgaatggctattaacctaatatattgacgaatgtctaagagtgggtaaacaaaccctaaatatcattctccgcccttacgaaaaaagaaaaaccaatctttgagtcctaaaggttggtttttcttttttaaaactgcatatggtataaattgtttagttaatacaatgtaccttatgggctatggctatgtataaaaaagctagcataaagctaacttttaaaaatgggaaataaggctaaataataatcaaaataaaaatgaactttaattattagcaaccaccaccaaaaccgccgccaaaacaagaagcgccaataatgattaataaaatgaatagtacaatgattaaggcaaagccgccaccacagccgcctccgccatagccgtaaccacagccaccgtaacctccgaagcccatatttccaccccctacatacttaatacttttaagatatgtataaaaagtgaaattgctcgcccatactctgcactggtaaaaataataggatttttgtagatatatataaaccctttagattactttacatagaatgaatgaaccatcccattgaatcccagtagatcagttaccctctctaacggatttgcagttgttaaaaaacagggaaactccctaccgcctgggagtttttctatttttttagatgtatatcatatatgttcagctaatataatggattttattggaattcattatctgaaaaggttttgaatagtattagagaaggctctaggaatgccacttcgataagccatctctctttaaaagaaaaaacaatccgtcttcgaagacagattgtttttcttttttaaactctgtaaattatgaaggtgaaaaataaagttaaagggattctaggtgtgagacgaaaattactcgatatacatcatatgcttttattttcccttaagtaacttgcctattgagaataaaattttatttcttaaacaaactactcaagatgtataaaatcatcacgactaacttctaattgcgtcacgaaaaaagctattggtccctgatgagccagtagtttttttctgttttcaataaggattaccaaaacgaaaacaccctgactatttaaaatatagtcagggtgttttccctctacttttgaaggtttagtcccaaaagaagattagcttttccgagttctatagtatatgaagatcagaagtagttaaaaaccagtacttataatacaaaatgaatgtgcgtaaactatctacgatgctctaaaatgcattaaataaatacaccccgtataaagccaatgaaagaaccactttttccactggttttatataaaggtacaggttataaagagaacaaacgtacatattcttataacaagaagtaaaattaacttcggagttttataaatgaactaaaagaaagtctactgagatccccagtagactttcttttttgttatgtatagttactgactatgttaagcaaactactcatgatggattggatcatcactttacaactacctttcaagaaacagaaaaagctgctgttgagcccagcagctttttctgttttttaagctgtataccatatacaagtatagtttacataatacctctttagaacacacggcaaaaaagaaccatcttgggagctagatcaggccttgtttcttttttactcagctttttatatctccttgatttctcaacgttcttttcaagtgcattagcaaagtatatgaataaaaagtgcactttttattcatatactaaacagctaaagttacttatatataaggaattgttacaatttcataggcaacgaacgcattgaagacataaatttctatgacaatcagttcggttacttcaagttgcttcgaatagaaggcttacgttgtcttcaacaggcgcataaggctctgataataataaagtggttactatatttttttctttcgaccatttaatgcccagtaaagaaaatccgtagataaactcacggattttctttacaactctttttccaagcagttaactcgattatggtgcagcggcttagtggcatactgtgtaaaaccaaggcgctcccaaaacagcttagctctaggattttgagacagaaccccaagacgtagaacggaaagcccctcttcttttagtttctcttcaaacgctagatacgcctgcgttccgaaactgaaattgtgataggcgctatgaataataaaagctccaatccacggatgatcatcgttaggattttgtttcatgtaatcaataacccctacgtatgtatcgtcggcttttataaaataactgtccgttttttcattcatatattctttaaaaagctcttcttcactccgctctttcttgccgttttccaacgcattgtatgcttcgtttgaattgataatctctgatacaatatacatcgtgtcagctgtaacgggttcaaatgagatcatatgtcttcccttctttctctgtaaagtagctgtatatcgttgctttatcaattttaccatttttcattcgtggaaaggacgttaaaactctccatacgcgcgggattttataagcagatacttgttttgtcagcgcttgtcttacttcagaaagagaaatgttctctaaaacaattgctgcacctactacttctgaacgttcagcatctactacgctaaaaacggctgcttcgctaacgcccggtatttgtaaaagcagctcttcaatttcttcagcatatactaagcttccgctgcttttaattacatttttatctctccctacgatggtaatgcttccgttttgaagctgaaccgcaatatcgtgcgatgtaacatatccgttaaaaaacgagcggttcgtttcttcgctgtccttaacaaacccttcaaatgcttgagttgttttcacaaatagtgttcctttatctcctttttcaacttcttttccacgctcgttcaggattaaaacgtctacgctgtcaacaggatagcctactgtatgaggcatcgtttcagctgtatgtggtgaaagcaccgtaacaaatcccatttcagaagatccgtaatattcataaagagaggcaacaggaaacgctcgtgaaaatttctttcgaacggaaggtgataatttattgcctactgaaatcacggtctttggtaaaagtcgtttttcatttggtctgctttgtacataacgaagtaacggagaaattaatgcgggtgtaatggacatacagctagcttccttgttaaaaacagctgaaggtgtaaacacttctagcatgatagcgtgcatgccgctgcaaagcgcatgcaaaaccgggtaaagctgggcggaatacgagatatgtaaaggaacaagcactttgtcatgttgctctaaagaaaatatatccgaccattcttgaaaggatgaagaccaagaataatgcgattttacaaacccttttggtctccctgttgacccagaggtaaatccaaataaaaatagatcggatagttcatttacttgccgtaagggcagcatcgttttctcttctcttattctagttaaagaagatgttttccatagccaattcggggattgaatagaaaaataagtatccacttcagcctctgttaactcattatgtaaaagcattacaattccaccggcttttaaaatcgctaaaaatgacacaatagcttctacattgtttggcatgcttaacgcaacgagctctcctttttccatccctttttcttgcagctgtttttcggctttgcatacacaatcccacatttgactgtagcttagcttattaatagaatccgatagtgccagtccatcaggcgtttgttggcactgattaaaaattagttcttcaattcgcttcattactgcgtaaactccctttttattttacttttagtgtaccgtaaatgtagatttgagaaaagaaaaatgtaaacttatataaaaataaagttgactaatttaagtttaataagataagatagtcatgttttatcatacacaacggaggtttacgatgaaaacaaaagatatgacgtacgttgcattatttacggctgtaatgggagcgctagggcttgttcctcctatttttctatcatttactcccgttcctattactcttcaaacgatgggggttatgctggcaggaggtattcttggggctaggttaggcgcattaagccaatttatttttttatgtttagtagctgtaggagtccctttactttctggagggcgcggtggtatgagcgtattttttagtccaagcgctggctatttaatcagctatatatttgcagctttctttataggatggacactatcaaagttgaaaacccttgcgtttacaaaggtattcataacaaatgtcctgtttggaattttgctagtttacgcttttggcattcctgtacaagcgatgctacttcacataccgttctggaaatctcttcaattaagtttagtctatattccaggtgactgcataaaagcaatcatagcagcttatttaattacaaaagtccgaaaagtagtaaccgtaactggtcgttccaatacagcttctatgtaaggaagtgatgactatgtatcaagcagtaattgtgaaagcgaagcgtacggtcattggaaaagaaaacggtatactgaaaggttttcatgttcaagagctaacggcccctttattaaaacaccttagcgctggaattgaacatgaaattgatgacattattttagggaatgttgtaggtccaggaggaaacgcagctaggctatccgctttagaagcagacctccctttttctatcccgggaatgaccattgatcgtcagtgcggagctggcttagaagcgattcgaatggcgagctatttaataaaagcaggcgctggaacgtgttatttagctggaggcgttgaaagtacaagtacttctccttttgaaaaaagagcacgtttttctcctgataaaattggtgaccctgacatggggatcgcagcagaaaacgtagctcagcgatacaatatatctaaagatcagcaggacagatatgctcttttaagtcatgaaagaagctgggaggcttttgaaaaaaggttgtttgaagaagaaacgcttcctcttccaaacgtgatgcacgatgaagcatttatgaaaaaacgaaacctaacaaagctgctgcaaaaagccagccccgtctttttaaaaaaagaaggcaccgtcactgcagcaaacagctgtggaattaacgacggagcctgcattacacttgtgatagaagagcaaaaagcacggtccttaggctttcagcccgttttgcgttttattgacgctgatatttcaggagtgtcacctctttaccctgctattgcaccagtttctgcgattaaaaatatcttgaagcgaaattctcttacggtagatgatattgacttatttgaaatcaatgaagcatttgctgttaaagttgtctcttgcatgcaagaactgggaatacgagaagagaaagtgaatattcgcggaggagcattgactctaggacacccatacggagcatcaggagctattttagctacgcgtcttttttatgaaagcaagcgccgtgacatgcgatatgtcatagcggctttaggaagcggaggcggaataggaacagcggtattatttgaagtaatcaaataataccgctgtttttatgccttttttattacattatgtttcatcaaatattgctcaatatctttaaatgtttcaatcggaacaaacggaacgttttgtccgcgcagtaaatcttgcaaagaatcttttgcaaatgtgacgtctgcatattttgctggatgcgaatccggctcgctgtctccagcaaaataaatcgtttcgtatgtctcttttagttcttgaataacagatgatttatcgatgccgtagcgttctgaatgccatctgtgagcagggtctagacgcaagtgaacgttgttttgatggaaatatccttcatttgaataaacttccactttttcaacaccgtatttatctaaaatcggtttaatatagtacgttgttccagcgcttaaaatataaaaatctccgccgtttttctgaacagctttaataaaagcgggcacgtattcatcaactggaatattcgctacgtcttctaaaattttcggttcttcttggtgaatggattgaaaaacagtagataaaaaatcaatatctttcatttctcctgctttccatcggtggaaaagttcttcaccttctggaaaatacttttcaatcacaatccaataaaaatctttttttgaaattgttccatcaaaatctgatacaaacgcccattttttcattccttacacaccctttgctacatactaagcagttctcgaagttcttcttctgccaaactagaaagcattgtttctcccggctgaataacctgttcgatgagttcttttttcttttgttgcaagccgtaaattttttcttcgatagtcccttgagaaataagcttgatgacctgcacaacatttttttgcccaatgcggtgtgcacggcctgccgcttgttcttcaatcgctgggttccaccataagtcatataaaataactgtatctgctcccgttaaatttaagcccgtgcctccggcttttaacgagattaagaaaatgtcttgttctccattattaaatcgatccgccatttccactcgttcttttgatggcgtttgaccgtctaagtaaaagtacgaaaggttttctttttgaagctcttctcgaataatgtgaagcatgcttgtaaactgagaaaagattaacaaacgttttccgttggcaaccgcatttcttgtaatctcaagcagctgctctaatttgcttgaatacccttcgtaattttcaacgaatagggatggatgacagcaaatctggcgcagtcgtgttaatcccgccaagatcttcattcggtttttattaaaatcttcaccggctaaagatgattttaactgttctaaatagcctacatataactctttttgttctttagtgagctcagataaatgagttgtttcaattttatcaggcagttcttttaatacatccttttttactcgtcgcagtaaaaatggtcttacaattcgactgacctgctccgatgacatgttcttaaacttgcgaagccctggaaataaacccggaagaatggtctggaaaattgaccaaagctcatcaagtgagttttcaataggcgtaccgctcagcgcaaaacgtttttcagctgaaatagtcctaacagctactgccgttttcgttgtatgatttttaatactttgagcctcatctagaattaaagcatgaaaatgaagatgctgatacaaatcgatatcttgacgcagtgttgggtaagatgtaatccatacgtcagctgtgctttttagcttctcctcacgctcgctcggcgttcctgtaatggtttgaaccgttaaattcggtgcaaatttctccaattcgttgcgccagttataaatcaaggaagccggcacaacaattaaaaaggcactgctatcttcatcaagctctttttcagataggatataggcaatgctttgaagcgtttttccaagccccatatcatcagccagaacgcctcctaaagagtagtgagccagagatttaaaccacttaaacccattgtactgataatcacgcaatgatgcctgcaaggattccggtacttcccaatccatttcctctggagatttgagctgtgtaagtaaccttttaaatgctgagccgaacttagccgctgatttatcacccgcactcataatctcttccacttgcattcctctgtataaaggtacttgcaatgagttatcctttaagtctttctcggttacgttcagctcacgaaacagattttgaatatgctcaaagccttcgttttcaagaggaataaacgcaccgttatctagacgatgatagcttttcttttctaaaacagattttaaaacatcttgaacggtctgatgattaatgcctcctaaatcaaaattaatttctaataatccattgctgtttttgatgtcaaccgttgttactggcgcagaaaaatccgtataagcataatctttcatctcatccgtaatatacacatccgctatttcatcaagctttggaacaatatgaaacaaaaattcatataaagatgattcatcttgatttaaatacagctggtttttataaatgtttaaaggagctgtttcaattaaatccatcacgcggtcttctttttctaaatctcgtattaagattttatcgtacttttcaggttgaggtgaaaatggattaattgaaatctctccataatggtaccgaagcgtcacaaacagctgttcatcttcctggtcaataaatacttttgcttttagttcaggtgcaataatctgatgggatacttcttttgcgatatccactttccccactttttttagtcctggaacgacgtgagataaaaaatttcccatctgctcttctgctataggtacgactggcttcaaaggcgccgtttttcgaagcccttcaagaagcatacgctgatcttgagatagctcataaaacgtcccctttaaaaatagccacccgtatcgatcaaaaaacgaagcttgatgaagctccgtaaagtcgagttcaaatccagctgccgggtgcttatttaactgaaacgaaaaaggagctgagctttcagcaaagataatattttcatatgagtgcccgtcatgaataaatgtaaagttccgatctttgagcaattgaaataactctttggctatgatggagggaatgattagttctctgttatttgcagacgaacgatacatagaataagaatgtttataaaatgattcatttgtcataatatccatcagcagctcaatgattttcttatcttcttctataaaaaaatgttccgccgggtcatattcgaagcgcttggtaaattcgtgagtttggaattctttagcgtctgttaaaaattcttgaatgttttttactacatacgtccggtcgacgcccactttcatttcaagcgctacgtacattccttctgaacgtaaaaattcttctgagtaagacttacaaataaattctactttcaacggatctttatctgcatatttcttatggtcgcttatggtttgctgatagctcgaaaataagtcgataaaatgatttacattttcgtattctttgctttggcgaaaaggctttgttttgattggctgcggctttgcgcgctcatcgcaaatggttaataaaacagctacttcgtgtttgcattctgaaaactcatgataagcaggacaatcgcagaatgaataaaaagaatttcctttttgttcaaccattacggtatacatttccgcacctcgaacggatgctgtccacgtagtggtctgttcgttgtattccaaatcaagcacacgcccctgcttgtaatacgtgtgtcctctatagtacgttctgcttgagtacgaatcttttaattgttctttgtttaatgttttatttatcatcgcttcacaatcttccaatcgcataacagtcaatgctgttgctgtttaatttctattcagaacaaataatgtccaacgtcataaacgttgaacattatttgtcaattcctctattataacatgcaacagacattataaaacactcttaagcagtgcagactgttttcgctgttttcttttgtagagtatccagcctgctccggcggatgataataaaagcaggctaagtcctgaaaaagcaagtcctatatgatcattagtcgtaacgtacgtaaagaagaaaatcaataaaatacgaattcctaacgtaataaagcgaaaacagctgtccactcttcccacgatagtattcggtattttctgcatcataaacgtatttcgagctactcttgtacctgcatttgcaaaagcaaggaaaaatacaatagaaaagtaaatgggcagaagcttcataaagaagatgatagatattccgagtgcaaagaggcttatattaagcataatggctagctcagtgcctgttcttttcataatagatacgatgaatatccctgcggttaatgctccgaaaccatatacggcactctcaatcccatatgctgctggacttgcgtttaattcttgagtcagataaataggaaacaaatagttcgtcatcattacagcaacgaaaggcataaaagaaagcagtaaaaaaatagataccgagcgattttcttttataaatgctaatccctctttcatcgcagtgtgttttttatcgcttcgttccctgctttgtttatatggaatactcaatagaaaaaggaatgcagctatatacgtagctgcatcgactattaaaatccattgaagcgaccaacgagtaatgactagactggccagagcgcctgcaagcatactcgatagctggccttgtatttccataatactgtttaatgattgaaacgcatcttttgaaaaaacttcttgatttaatgcaaaaatcgttggataaaaaaacgtgtagtaaaggtttccggttccgtacaaaatgatgtagtgaatggttgaatagtctgtcataaaaccaacgatcacaaatagcatgaccgtgataaaacctatcaattctacggttaacaacattttctttcgtgacattcgatcaataagaacacctatatacggagtagccacaaagctaatcaccgtcatcatcagcataatcatgccaaatagtttatttccatctggagatgcaactaacagtaaaggaatggcaagcatcgtaataccggaaccaatagaagataaaacattcgcaactactacggcttgaaagcgacggtccttataaagcgccttcatcaaacattttgcttagcttctaaaatttgcttagacacttgtgtatacatagtcagctcattaactaattcatgaattccgtcagctgcgttttttcgtaaagtccctttttccaggatgtctgcagggtctaataccaactgcttagatagaacattcgcatacaaggcgcgtgtaacggttctaaggttatttaaagcattaatgcctccttttcctcctcctgatactgctaaaagtgctacgggcttatgcgcaaaatacgcactgtttaagaagtcaaacgcgttttttaacgctccgctcatagctccgtggtactcgggcgtcgcaagtaaaataccatcccctttttctatttttttaatcagctcttgtacttcttctgtttcatactgatgaggttcacctgtgaagataggaagtgataattggcttaaatctaaaaaagaactttgatagcttttgtgaatctctctcgtcacttgtgttgttcggcctgtttctctgggacttccgttgataataagtatgttcatgcttatctactcctctgtcgtttggttatatatatagtatagggatgattgaactttttttcgtcatgctattggtagaaagaaagctaccaatatagacggagaagcacagagaaaaacctacgactaaagtcgtaggttaggaaatgccgtgctgcacagcatatagagcagcttgcgtgcggtcttgaacaccgagcttcgataaaatattagacacatgtgtttttactgttttttctgtaatatgtaaggaagcaccaatttctttgttgcttttaccctttgcaatttcttttaatacgtctttttctcgtttcgttaagtggtcaataaaattgactttcttttcgctgcttttggttaaccgtgttagcaagtgcgtagtgactttgggatgaagctgattttctccgttcattagctttcgaattgcggctacaagttcatctggatcgctttcttttagctgatagcctgaagctcctgcttctaatgccggtatcacgtgatcttgatctgaaaagcttgttagaatcatgacttgtatatgcggcgcttgtttttttagttcttttgttgcttcgattccatctagaaccggcattgataaatccattaacacaatatgaggctctagagatgtcgctagctttaaagcttcctctccgttagaagcttctcctacaacttctaaatcaggctgcgtttgtaagaaaaagacaagtccttttcggacgacatggtgatcatctgcgattaaaatctttattttcatgtgcgctcctttccgttatgaaagaggaatagatacttccacaaccgttccgtttcctatactgcttgtaacagatagattcccatttaatctgtttattcgctcctgcatggtttttaacccaagcgtcggcaactctgctgaagggctatatataaatccattgccgctatcttgaattttcataattacctgttctttgcttatatttacgtttaaatgtacctctgccgtacccgcatgctttcggcaattattaaaagcttcttgtccgactctccacagtgtctcttcaatcacagcaggcaaaacggacactcctttaatttgttcttctatgttaagccctagcatttgaccatagctttttaacgcactgacaacgccgttttctaatccttgaggacgaagctgccaaattaaagctttcatttccacttgagcatgctgagcagtttcttggattaaggaaaaagtctcttttaactgcacatctttcgctaggctgcttccggctttggctgtgacattaattgaaaacaacagctgattaacagaatcgtgaaggtcttttgccagcctgtttctttcttcaataagttttacttcctgctgagattgagtcagcttaatccgcttgatagccgtgccaatttgaagagcgacggatcctaataaatcaagctctcgctgttcaaaatgaattttatgaggggcagctacatttaataatccaaagcgttcatcccctgcttgtaaaggaaccgttgcgtgatgggtaatgtcgtgtgtatctccccactcataaatgacggaatcttcaagtcttttgcactccataatattagacgctttttgaagccggccatccatataccgatcaacacaccagcagcttccgttacacataggctgagcgcttttatttaataaagctggcggcaaatgctgagcggcaatcatctcatgttttccatttttatcaataaaaaagatccatcctgtttgtaaatctgttatttgcagcagttttaaaagagcatcgtgaagcattgtatgtaaattagtgccttcatttaaaatctcggcaatgtcttttaaaatcttaagctctgaaatatgatctttttccatagcctctctcctatatgatgtattttccattttttattttatcacaattaaagacgattccggctaatagaccgttatttttaaggtgttttcgcttaggtatgtaagagtttttgacatcaataataaaaaattcaaaaagtatgtcaggtagtttaacaattagctagagtctttacgtaaaacgaactataatacagataattcacgtaagaaaagaaaaaacgaaaggaaatgagaagagaaaaatattaaaattaatatgttgaaaacgcttccaaaaatgaaggcatagtgctattatataattattaacagaatagggatgtgagaaagatgaataaattatttttagaagagttacgatacattatcttgtgtgaagtgcctatgacaaagtaccgagtagagcagcttcaagacaaatttgatcaaagcccctacttaattaatgaactttatcaactcctattcgaaaagcgtcacattttagctttcgttgatgatattgaatcatccctgtatgactatattgtgaataaagaaatgatggatgctaaaacctattatggagctattacacacgtagcaaatcttttcagcgaaacgcctacatatataaaatgcaaaataaaaaaatatagagagtcttcgatttcaagtatcagtgcctaaaagttgcgcacagctgattcaaataaaaagcaaaaaaagaaatcctagcacaagggtttcttttttgtaccactaacctatagggaggaaaataagatgaagacattttttatcacgaatcgctattcgtttcttgaaacgcaagtaaatgaatatatgcaatcgttactggtaaaaacacctgaacaagttattttatatttcgaaaggcaaattcggaagtataaattgtatttacagaaaaaacatcattatccagagtgtatggttcaatctatccaccgtttgattgaagaatattcattaattatcattagagtaaaaaaatatattagctatcaaaacaagctgatgaataaacagctattagagccgcagtaaaacgaatcattttttatggttcgttttactgcggctctgctgttttactcctcatattttagcagtaaatgcagaacagctggacgttcttcaagatttttgtatgagtgtacatgacttccttcaaattttatagagtcaaattgttttagctcgtatagctcttcttctattttcatttcgattcttccttccattaccgtggctacttcaattaatcctttatgatgaggttcaggacagtatgtagcgagaggagaaagaaaggctcggtacatttcaatagttgaatctatttgattttgaaaaataaattctactttccacgcttcgtccggtcctttgagagaaaaaccttctccgcacttagatacagccactgaaggttgtactgacactaatttagttaaagggatatttaaacctgttgttattttccacattactcctagggttggattagtctcccctctttcaattttccctaacgtgagtttgctgactcccgtcctatctgctaattcatcgagtgtgaattctcgctgtgttcttatttttctaagctcgttgcctacctttttcatcatttcttctgaatgcatttttaccttcctttcttttgtatattatggtacacttttttttatatctaagtatactataatatatatttaggtatttttattaattaggaggaaaaagtatgaaagcaattttatgggggcttctctcgtccatgttcttttctgctacatttattgtgaatcgtgccatgaatgtatctggaacaagctgggcttggacagcatctcttcgttttttattagcactacctattttactcattttagtacttgtacaaaagaagtttacaccattatggatggaaatgaaaaaacatcctttcgcttggttaggttggggaactcttgcaggaattggattttattcattattaagtttttcttcgctttttggaccgtcatggctcatagctggaacgtggcaagtaacgatcttggcaggtgcgctcatttctccccttttctatgtaactattcaaactgcagacggaaacaaaaaagtaagaggaagcattccactcaaaacgcttggtatttcaacgtttattttagcgggtgtgattctcatgcaagttaaagaagctgaaaacatcacgctttcacagtttgtgttgggttttctccctgtcgtcatggctgcttttttatatccgcttggaaatcgaaaaatgatggaagtttgcaaagggaaattagatacatttcaacgtgttttaggtatggctatcgccagtataccgctaagtatcatctatgcgatatatggattttatacaactggtatgccaacagctcctcaattttctcaagcctttatcttagcaatgagttcaggtgtaattgctacgatgacgttcttttacgcaacagacttggcaaaagaaaatttaggtttgcttggagcggttgaagcaactcaatcaggcagcatgatttttaccgtgcttggcgaagtgtttttattaaatggccgtgtgccaacagggattgcgttagctggtatgacgataatcgtaattggaatgattatgaacagtatgctaaacaaaaaaacaaaactgtcttcggccgccccgtcacgtactctatcaaaataaaaaaagaggagatgaaaatctgtttaaaggttttcatctcctctttttaatattcgagatgattgttccaatagcggctccaaagcacagggaatcgcatctgtaaaccatcctcatcatcttcatcccaatcaagatccaaatcttgctcatcgtaccacactggatcaaactggtcatatttatcataataataatcgttatctaaacctgtcttttcttcgtaagcttcacacgctacagaaagtaattcttctaattgaggagcatagccttctgcttctagtggtttaagtacagaaatcatcgtctcaggagattcaatcgctttataatatatgtcttttccctgatataaaagccacgctctaaaataatcaaaacaatcatctgaacaaccgcccattacaatataagctgctgcccacaatgaagaagtataggattgatcaaaatgctgatttaatagctgatcaaagcgaaaaatgtccttttcagaacgcttcgctagcgtggagcggagccattccatttgctcgtcgacatctaattttgtcttcgccttttttatcagttcccaaaagagagcctctgacatcgtactgtctttcattacttgcatcgaacaagttaaaggtttatatcctttcttcaattttgcacgaatcagcttttcagcttccgcttcacaagcttctgcggaaacaaactctttcacttgcatgcgaccggctgtatcaacttttccaaagtgaatgactaacttgctgtctcttctttcaactttccaaaatttattcgattgctcatctttatacactaaggttatttgcatgatacattcccctttttcatcctactactattgtgaatatttctctttttacaagttatgtagagccatggcgcttcataatcccttttctttgctttttaacatgtttcagttgattttactattgctgaggtcgtttaaatattgagcaatgaacacaaatttgtgtaatatgttcattagttgtttttttgttgcgtttacaacattttgtttttcctttatactcttttatatcagatatctttattatacaaaaaagaatcataaattcgcagcaaaggaaggattttctatgaaaattaagcaaattacaacaaaagagcagcttgaagaagtatttcatatacgtaaaacagtgtttgttgaagaacaaggcgtgccattaaaagatgaatttgatgaacatgagaaaacggcaaaacatatgttgatttactataacaatgaaccggcagcttctggtagattccgcatagtagacgattacgccaaaatagagcggatatgcgtattaaaggaatttagaaaatacgggctcggaaaagaagtggtggccagcttagaagaagcagcgaaaaaagaaggattaactcaagctaagcttcacggtcaagttcaggctgaacctttttatcataaattaggctataagacggtttcagatgtctttatggaagacggtatcccacacgttatcatgaaaaaagaattttcttgttaaaaatgcttctttgcacagttactttaataaagaaaaaggctctcagcagagagccttttttgtactattagattttcataattccgcctgtgctagcagaagttacaagtttagaatatcttgcaagatagccttttttcactttcggctcaaagcctttccagtttgcttttcgttcttcccaaacatctggagaaacttgaacgttcatcgaacgatcctcaatgtcaatcacgatgtggtcgccatcttctacaaatgctagcggtccgccttcagcagcttctggagacgcgtggccaattgataatccacgggaagccccagagaagcgtccgtccgttaatagcgctacttttgcgcctagtcccattcccataatttgagaagttggagctagcatttcaggcattcccggtccgccttttggtccttcatagcggatgactacaacatgtccttcttttacttttccattagcaataccgtgcagcgcctcgtcttgagactcaaatacaattgctggtccttcgtggcgagtaatgccgtcttgaacaccgcctgttttaatgatcgcgccgtctggagctaagttaccaaacaatacagcaagtccgcctttttcggtgaacggcttatcgattggatggataacgttatagtcttttacatcgcagccggcaatgttttcgcctagcgtttttccagtaaccgtcatcgtatctaaatgaagagctccttcttttttagatagctcgtttaaagcagccgatacgcctcctgcttcatgtaagtcctcaataaatacatccgaagccggagcgagttttgccaggtgaggcacgcgttccgctacttcattaatacgctctaatgggtactcaatttcagcttcattcgcaagagctagcgtatgaagaactgtatttgtagaaccacctaacgccatgtctaaagcaaatgcgttatcgattgctttttctgttacgatatcacgtggttttaaatctaatttaattaattccataagctgtttagctgattttttaacaaattctctccgttcaggagcaactgctaagattgtaccatttccaggtaaagcaagtcctaacgcttcagctaagcagttcattgagttcgctgtaaacattcctgaacaagatccgcatgtcggacagccaaattgttctaattcaagtaatcctttatcatcaagtttaccagcttgatgagctcctacgccttcaaatactgaagaaagagaaatcttacgaccgtcgctcgttacgccagccttcattggtccgccgctaacaaaaactgtcggaatattcagacgtaatgaagccattaacatcccaggcgtgattttatcacagtttggaatacataccattccatcaaaccagtgagcagatactaccgtttcaactgagtcagcaatgatttcacgacttggtaatgaataacgcataccgatatgtcccatcgcaataccgtcatctacaccgatagtgttcatttcaaaaggtacgccaccagcttcgcgaatcgcatcttttacgattttaccaaactcttgtaagtgaacatgacctggtacaatatcaatatatgaattgacaaccgcaataaacggtttgccgaaatcctcttcttttacaccagctgcacgcagtaggctgcggtgcggtgctctgtcgaatccttttttgatcatgttacttcttaattctgccacaataattccctccgtattcatctaacctattaaaaactgaatctttttaaattgtttaataatttttaatataaatactaatttaacaaatcacataaaggtttgtaaaggtttatgacaaaataatcattttttattttaaaatagtaaaatcacctgcataaattagtataatatatacatatatcccttattttacaggaaagcagaaggtgaatgctgagcatgaaacaatccttttactacagaggtcatcaggaaaaagaaatattcgcacaaaaatgggatcttgaaaacaattctgcaaaaggcgttgtccaaatagttcatggaatggccgaacatattggacgctacgaatactttgctaatgtattaacgcaacatggctacatcgtatgtgggaatgatcaccgaggtcacggtcaaacagctttaaaagatgaagacaagcgtttttttgctgaagaaaatggttttgatacagtagtctacgacgtgattgctctgactaagcacatttcaacggaacactccggcttaccaatctttcttttcggtcacagcatggggtcttttctaacgagaagatatattcaattgaatacagagcacattcatggtgtgatactctcaggtactggcagcattccttccctttcactgcagggcggcatattagctgcgcaaatagagataaagagaaaagggttacgatctcctagccctttgcttgataagctctcttttggacaatacaataaatcatttcatcctgctcggacaccttttgattggttaagtcaagataatgaagctgtagatttatatgtaaatgacccttattgcggaggagttttcacagcgggatttttctatgacttattaacaggaatcaaacaaatctctaacttagctaatataaagctagtcccatcaagcctgcctgtttatttaatatctggagaacatgatccagtaggcagctatacaaaaggtgtactcaaagtatataacgactttaaaaaagccggattgcaggacgtaagctaccgcttttttacacagtgccgtcatgagttgcttaatgaattaaataaagatgaagtgatagaagatatactaaattggcttgacgtgcaaatggacaaaaaaaaggttcgtgtctaaacacgaacctttttttattaagcaaatacagatgttaatacaggtactacttgttttttacgtgatacaacgccttctaagacagctgtattgttttcaagcgttacgttgtatgcttcttctacttttgaagcagcagaacctaatgctaatgcagtagagttgctgtttaaaatatctgtaacaactaaaaggaataattgtaatcctttttcttcgattgttttagtaatcgcttcttccaattcaactttgcgcactaaaacgtcgtttacgtcaattgcattcacctgtgcaatttcaactttgcttgtgcccatgctgaattctttagcatctaatgaaattaattgtgaagctgttttatcgcctaagtcagctccagcttttagcattgctaatccgtattcttctgcatctacgcctgcaatttccgctaattctttagcagctgcaacgtcttggtctgtgcaagttggtgatttgaataataaagaatcagaaatgatagctgatagcataagacctgcgatgttagattcgatttctacgccgttttctttatacatcttgtttaagatcgttgccgtacatccaactggctctgcacgatagtataaaggatctgctgtttcaaagttagcaatacggtgatgatcaattacttcaagcacacgaacttgatcaatatcgtttgcactttgctggcgttcgttgtggtccactaaaataacttcatttgtttctttagatacttcatcaacgaaacgtggtagttcagcattgaacttttcaagagcgaattgcgtttcgccgttaatatcgcctaatcgaactggttcagcttctacacctaatttattctttaaatcagcgtatgcaattgcagaacagattgtatctgtgtcaggatttttatgtccaaaaattaacgtctttgccatcttaaatctctctccttcttacgtatgtaaatagcattcttgcgtaaagttagttaattcgttcacgcaacattgccattttaacataaacttttacattattttaatttttttgcgaaaaatgatgttcatccgcagatattttgccattttgtatcttttccatagtaaaaacacctctatttccgatataaatagagggttttatacactcattatataaaagttagcgataaaacacaagctctctctctatcacttgatagataacttaaacgcagtatctttccacttttgataaagaaaaagtagaacagcaataaccatcattagtacaaataataaaaaatgattcatttccttcagtgtataaatgtctagcttttcaaagataggactcatgacaaatgcctgaaataactcgaaagctgcattgataatcataaacatccaaaagccaggataggtaaaataaaaagcgtgcctattataaatatgtcaaaaggaaaaggcgtcatattaacaaagaaaaaaagagttttattcacttcccaccagttaaagcgatctgcaatttgaaaaacatcgttaacaataccactccgaatagtgatacagccatataccgctttactcgctctttatcaactgcaaaaagcaatagccagggaccaataaaaaacacccacattataatttgcgccatgaacattccgcctttcatttcaaaaaaagagaatatacattactctgtccttatttatgtaaaacaaccaaaaaaagcaccctatatgaaggggtgcttttttggttatcgtcgcggtgtaaagttgaaatgttcatttacgatagctcctagctcttcaagaaactgctgagcagtcatttcctctacgctttgggtataccatgcaagctgagattttttatgaacattgttgtaatatacatctcttgaccaatatgtttttgatcggtatgtataattaaagtgaatgaatagttcactcccgtctggagactgcaacaacacgcggtaatgtggattacgacgatttttatctaaactcatttctttgatttgcgctaacattattcacctctaaagccattacttaatcatttaaaggtaaatgccataccacgctatatcctagttctgccatcaactagaaaatcatatattttctaaaattctacacgatataggacaaaagaggaagagataatttattgagggacgtgtaaagtttcatataaatcttttagttgctcagggtattgagaccttacgtaataacccgtaggacggtgctcgattaaatgagaagcaaacaaatagccgatgagcacgtgcatttgttcatctgaggtttcttggcttaattctctttcgagtcgttcagctaagtgtgaagccagctgtttaattttttcatcatgtgataaaaaaagcattttgttctcccccttataacgaataaataatgctgtgaatttcaataaagacaaagtattacttttataaggataattatattttattttacaataaaagtatataagtagttctaaatattcaaaaaataacttgtttcttttggactatttggtaacaaacaaaaaaagaagcgggagctgtcccgcttcttttacgtaaaaagatattcgattaccgaaatttattctacttccactgcccagccgaatggatcttccactgtaccattttgaatacctgttagagtgtcatacagtttttgtgatacttctcccgtgtttccatcgttgataaccattttctcgttattccaaaatagttcgccaattggagaaataactgcagctgtacctgttccaaatgcctcttctagtttgccttcggaataagcttgcttaatttcttccatagaaatacggcgctcagttacaggcatatcccagtgttttaacagctcaatgatagatttacgcgtaattccttccaaaatgcttccgttcacagatggcgttactacttctccatcgattttgaagaaaatattcatgcttcctacttcttcaatgtatttgcgttcaactccgtctaaccacagtacttgtgaatagccttttgagtcagaaagctgctgagcttttaagcttgaggcatagtttccgcctgttttagccgtccctgtccctccggctacagcacgaacaaattcgctttcaaccgcaatttttacaggggcaatcccttctttataatatgaaccaactggagaaagaataatgataaattgatagcggccagatggcgctactcctaagtaaggctctgttgcgatgacaaacgggcgaatgtatagtgatgtaccttcagcagtaggaatccattcgcggtcaattttaatcagctgttttaacgcttctagcgctaagtcttcatcaacatgaggaatacaaaggcgatcgtttgatttatttaaacgtttgaagttctcatctggtctaaataataatacttgctctttttttgttacatatgcttttagtccttcaaaaacagactgcccgtaatgaaagatcatggatgccggatctaatgtgataggttgataaggtacaatacgagcatcgtgccatccttggctttctgtataatccataatgaacatatggtccgtgaagattttcccgaattgcaattgatcagattgcggcttttctttttttgtttgacttagtgttacatcgattgaataagttgtcatagttgtttctccttgctctttatatttacgggtttttcgcttaaacctctatataagttacattgtacaactttagggaagcgtgtcacaatagttagagacgaaaaattctaaaaattttataaaaattataaagaaatagcacctaatagaattaagtgctgaattgaaaaggttttctttctaaaaaaactatttctacattttatttacaactatttataaaccaattttcactcgaagcttttcatcttgtattgaaaattgtttgattttccccactggaatgaccttcactttatcaatttcattgagattgatatgaatttgtttttcttcatacgtagtaacaggcggcttgtgaaaaattcgatagttgatccaattttgattaagaggtttcatttcatggattttgaatagaagcgtacgttcttttgcctcaagaggttctagcacaatggaaaatggaattctcaccagaaattttttaataattccattcacgtgaatataggagtcttgaaatgaaatagaaaattgctgaatttgatcttgctttgtcatttgcttttgaaaaattcgcatgagcatagaagcggatataggaacggttaccccgctttcagccatcttttctttcatttttgcctgcacatcatcactaattacatcgtttagctttctctgtacccaatccttcatggtgcacctccgctatgaagttatcttgctgtttcctctaacgcacgaattgaagatgttaaatggtttgacacgtcggcaaggcgatcttttgtcagtttatcttctccaaggtagataggttttccaaaggagataacaagaggaccctttgaaaatagttcttttacatttgtaggtcctttgtaaactgcgggtacaataggaacctttgccatgctcgctatagtgactgctcctttttttaagggaacgtcttcctctgttcgcgtgccgctagggaaaatcccgacgatatgtccttcttttgctaatttaataggtattttaatgctgctgggtcccgggttgttacgatctactgggaatgcgttgagtttttttaatacattactagtgagtatatgattaaaaagctccttttttgccataaaatgaatttggtgaggcaaaacagccgcaccaagcgctacaacgtctatccatcccttatgcgaacaagcgatcacaaagcctgtatccattggcagatactctctgttccttacgtggagcttccctctccttttcaataaaaatttacatgtgtgagccgcgacattatacataaatgtttcctcttctctctattatttgaaaatatatacaaaattatatcacttgatattaatatctggtatcaaaaaataaatgtaacatctttttacataatagcttacctgcttctatatatattgtaaaaaagtagatattgaaacctctatttttggtcaacttgactaatgacatcccttaaaaaacactttactattaatgtatcgttctaaatgtaatatttattaacattacatgtgatataattaaaggaggtttttaggtgaataaccaaaatcgaccgtttcgactagcttcattgggattacagcacgtacttgctatgtatgcgggtgccattctcgttccgctgatggtggggcgcgcattgaatttaaatgctcatgacttatcctatcttgtggccattgatttactaacatgcggactagctacgctgctgcaggcatggacgaacaggtggtttggtattggtcttcctgttgtactcggaagctcatttgtagcggtgactcctatgatttcaattggaactcaatatggaattagcgctgtttacggagcgattattgccggtggtattttcatcgtactggcagcaagttttttaggcaaaattattaaatttttccctcccgttgtcaccggaacggttgtgacgatgattggtttatcgcttgtaccatccgctgtccgaaatatggcaggaggagtgggaagcaaagattttggttctctttctaatcttcttctttcttttggtgttctagcgcttattttaattttaaatcgatttttcagcggttttcttcgttctctttctgtgttgattggaattgtagccggaacaatagccgctatattaatgggaaaagttgattttactaattttaatgaagcttcttggctgcacgttcccactcctttttattttgggatgcccacttttgaaatcgggcccatcttaacaatgattctcgtatgcttggtcattattattgagtctacaggcgtatttttagcgttaggaaagctgtgtgatcgggaattaacggaaaaggattttacaaaaggctaccgtgcagaaggaatcgccattgtccttggagggctatttaatgctttcccttacaatacattcgctcagaatgtaggactggttcaattatcgaaagtaaaaacaaaaaatgtagtggtagtagccggcttcattctcgtattactggggcttgttccgaaaatagctgcttttacaaccattattcccacccctgttttaggaggagcaatggtcgtgttatttggtttagttatttcatcaggcatcaaaatgctaagtgctgttgatttgtccaaacaagaaaatttgctgattattgcgtgctctctttcactcggccttggtgtaacggtggtacctgatttattcgctcagctcccaaatgctttgcgcgtaattgtaagcgatggagttattacgggaagtttagctgccattttattaaatctcttttttaacacatcaattgaacgaaaagtaccttctgtctctttagagaagacagattattcagaaataaaataaaggtggtgtagtatgaataacgtatctgtgcagtatgtaaatcagcttagcaagcagcattttgtttcactagttggtgatatatttgagcattcaccttgggttgcagaagaggcttattctaaaggccctttctcttccgttgaacaacttcacggcatgatgaaagaaattgtagcgcaagcgtctgtagaaaaacagctgaagctgctgcaagctcatccaaatctaggtgaaaatattgccatgacatctgcttctactgaagaacaaaccaaagcaggcttacaaaacttaacgcaagatgagtatgaacagttttcttctcttaatggaacgtatatggagaagtttccgtttccttttattttggcagtacgaggtaaacaaaaagaagatatatacgaggcaatgcaaagtcgtttactaaataccgagcaaacggagtttgatacagcgttagaagaagtatataaaattgctttctttcgcttaactgataaaatcactgaaaataaggagataaagaaacgagcatgactaaaatcacgacgcatattttagatcttacccacggatgtccggctgcttttgtcaaagttgatttttatcatatacagtcggaaagtaaacgaataaaaatttcacacggtactacaaatgaagacggaagattagtaactccgctcttctcttctgaagcgtttgaatcaggagattatgaacttctgtttcatatcggggaatattataaaaaacaagaggtccaaacaacaaatccgccctttttaaatcaagtttctgttcgagtcggattgtcttctgaacaagaacattatcacgtccctttgcttgtgtcaccgtggggataccaaatttatagaggaagctaaaaaaagaaacggcgtctttaaacgtcgtttcttttttagttcagcaatttagacatatagtactcatcaatgaacaaaccgccaattcgcagtgaatgtttttttgttccttcaatttcaaatcctactttgtcatataaagaaagagccttttcatgctgtatagcgactgtaagttcaagacgatgaatatggtgttctctcgcccattcttcaagtgcaccgattaaagctgtcccaatcccttgattttgaaacgtctttcgaatacctaatgttagagaagcgatgtgagcgtttcggttagcttccccccctgttgccgctatatatcccacaagcatctcgttttcttctgctacaataatcgtagagtttggctgctgcttaaagatttcgatgtttttctcctgctgatctgtgctcagctttcgctctccgctttcaaacagcataaacttactttcttcttcaatctgtttaagcaaatctacaaagtttgcagcatcatgtaattctagttctctaatttgcatgctgatccccctttttgtgtgtcccttttgtttgtatatgtattggttcaccattataaaatatagctttacagtttcttacgaaaaatacgactttttaagaagccgaagtagaacaaaaaacctactaatctccctttttttgaaatgcttttttcctctgtataattttaaatcacttatcaacttctgtaaattttttagattccctcttttaatttccaagtatcttccttttctatgggtttgaattggatctaaggagaccttttgtagaaaacacatgactattatcctgttttttatgaagaaagaaagcaataaatgtaattttacttgtaatcgtttaaaatagaaaaagtggaaattttatgtacctatcctccttaattattggtctgtgaaaggaatttattatgaaagtacaacccacaaaatgtggtgtatatgtcttaagcggtctaggagctgttatggtgttcttcttacttttacttaagaacagtgctttttttctagaggaagaatacgatcaaaacaaacctgaagctacgctttcggtcaacgaacatacctatcaccttcacaaaggttctattaactggtcaaacggccggtcaacaacaaaaaaagaaataaatgtatatgatttatatacatacatattgcagcaaaaaagtatcccattgaagcagcaacaattggttaagctccatttttcgaacttagacggtgcttatattcgtagtgtgagtgtgcatatatggagagataacggtgaaaaaaccaagctgtttgtcaaaaataatgaatttaaggttcctgaaaatcaaggtttgtacgttgttgatattgtgattaactctacaagaggaacaatgcaatatgcggcaaatgtgcaaatacagtaagtttttatatatttacgtttggtcgagaaaatcggataagaaaactcttgttgcgagcaggaaacgatgtgtggaataaaaaagaagtattaaaaacatagtgaaagcattcaaataacagcccttaactttttcggaaaataatcccacaaaaaaagagagcgctagcgctctcttttttataaaatgaaaaagacgtccacgcaggacgtctttgatgcgtttgtggcggggaccgtgtgaccacattcacacgtttagctcgaaagcatgtccttcgacttacacaaattagctcatcgctttattaatataacatccgccacagaaaaaagcaatcaatttttaaatagtttttttctatttatacatatttcgcgagaatccacaaaataatatgcatgcatagctattcactctctacatttttagtctattttaactcaagtacgaatatactaatagaccaacctatgcgcagtttttgaaaaaggatgtgaatagcttgtttcaaatcactgatttccctgaattttcatggtcatactccaggcataaaatggtcacagagtgcaaacgaaagtatgcatatcattattatgtctcacataacggatggcttgacagcgcttctgctcagtctcagagcgcttatcgtctaaaaaaggtttccactttatctatgtacgccggacaagccgttcgtcaagtgattacagaggccatttctgactatacctctacacagattgtcccggatgaacagaacttaacggagaaagcgcagcagctactaaataacgcactgcgtgattctactgactatggagagctttggtatcataagcccgctcagtataagatgcttttagaattctacgaaaacggctatatttctaaaaaagatcttaaagacatgcaaaaacgggtacacatttgtatacatcactttttacaaagtaaatcgtttggcgacatcgtatcttcaccttttttagaagtggagcctcatcagtcatttcgttctataaatgtgtatgatcataaagtatatgcgccttttcattctctttttaaaaatccagtcacagacgaatttacgattgttgactggaaaacaagtaaacaaacaaaagatgatttgtttcaactggcgatatacgccctctacgtgctagccgaatataatatttccgttgatcagataaaagtccgaaacgaatacttgctttcaggtagtgcgcgtacgtatcagcttactcttcatgaaattgaagctgttcttcagcaagttgatacaagtattgattatatgaaaaattttttggaagactcagaggtaaatcagcctctttcgcttgagcatttccctcaaacagatacgcctgcctcctgtcacggctgtgcatttaaagaattgtgccaaacgggataaaaaacagctgaagatgatctatattttttgctaaacttttttattgtcaaaagaacctttgctagcatataatttgcattaaggaaacattttatacttcatataaaaaaattagcttgggctatttattgttcatcaaagaaaggagcactagacatgaaagatcaaaacggcagtaaagcattatcggctatgcagctaagtgctcaagacgtattgtcgggtaaaacaaaaggaattaagcgattattgcctttcttagggcctgcttttatcgcagcggttgcttatatcgacccaggtaattttgctactaacattgcagcaggctctcaatacggatacatgctgctttgggttgtattaatttctaacttaatggctgtcttaattcaatcgttatcagctaaattagggattgcaacgggcttgaatttacccgagatagcacaggaacacttcccgtccttcgtttcttttggactttggatccaaggagaattggtcattatggcgacggatttagcagaatttattggggctgctcttggaatttatttattatttcatattcctttgttcccagctgcacttatcgcagcggtaggttcttttgctattttagagttacaaagacgaggtgttcgactgctagaagcagcgattgcggcgatggtttttattgtggtattagcttttgggactcaaatgtttcttgcgcatccagacggcgcaagtgttgtccacggcttatttgttcctcagtttcacggaacagacagcgtgctgctagcttctgggattttaggtgctacagttatgccacacgcgatttatttgcactcagctcttacgcagcgccgcgtggtaggaactacagaatcggagaaaaaagcgattttccgctttgaatttattgatattgtgattgctatgattatcgctggtgcaattaatgcaagcatgctgattgtcgcagccgctctattctttaaaaacggactaaacgtgcaagatttggacgtggcttttacacaatttgaacatttaattggtccctttgcagctattgcgttcggagttggattattatcttcaggactttcaagttcttcggtcggaacaatgtctggagatgtcatcatgcaaggatttattaaacgcagaattcctttatatcttcgccggttcattacaattattccgccgcttttgattatcgggtttggcgtaaatccaacaagtgcactagttgtcagtcaagttattttatcgttcggaattgcatttgcgcttgttcctcttatcatgtttacaagcaacaaaaaaatcatgggcgggttggttaatcataaagcaacaactactgtagcttgggtgatagctgcattagtcatttgtttaaatatctttttgatttatcaaacgatagcatagtaaataaatcaaactttcaagaaaaaacaaaaaagagaccctaaaaagttaggtatagtctaacaatcgggtctcttttttgttatttttttattaaacgatagtaaaaatgaagtagacgagagttccaataatggccgacagtactaagcaacccagtggatataaataagagtagttttttttacggattgaaagaatacgatcaacaataaaaataagaatgacgcctatcattccgaattcaaacattaacaacccaaaaatggcgtggaatatgaatgacatgataaaatcaatttttttactacggtcttttacaaacgcactgactaataaatcaacgatcaccgtgcctaaagtccccattattaaaaagaagggtgtaaaaaataaaaggtataaaggaaataaatcaacgaaatgcggactggtttttttaatagaaaaattgggaattgactcttttatacctggtataaaacaaaaaagcaaagcgaaaagaaccatagctataatagccgctgatagctttctatttaaatgcatgtttatttttttattactaaattcagtagttgtttttgtattattatgattcatatgtctttaacgtgatgtacgcaccttttcctttctcataacttttttatttatattttgtgtctatcttttgttaccagcagttacaatgatacacgttctttttgaacttgactacactaacgcgctttatgtctattctctttttctttttgtgtctatcgtttgctctttctatgagaaacaagatagttttataaaaaacgtcttctttttctataaaacaaaggacaggcgtttttttctgtatgtaattaataatcttgtttggcttcttcaaacttaaacacatccgctctataacaaaaagagacgatttccgcctcttttttgtttgttcgtattatgaatttagttcatctaaaattgaatgcagttcacttaaatgggtaatttcataagtaggaataacttcatttcgctctttatcgtgacgattaatccatacagatttcattccaacgcgagaagaacccagtatatctgtcattaaattatctccaaccataatcacttcatctttctttaaatccataagtgataaagcatggtcgaaaatagacggatcaggtttaccgcggccaaatgcacctgaaatcacaatctcatcaaaatatggaactagttctgatgtaatatccaatttggtattttgtaagtcaggtgaaccgtttgttaacagcagcagcttgtactttccttttaattgatcaagcacttcaaacgtttcttcgtatacaaaaggtgttttgcggcgctctaacggaaaacgctcagctagctctgctccaaaagcatcatcgtgaattcctagggcacgaagacctcgagtccaagcttctttgcgataagtaggaacaatatctttcattttgcggaattcatcatgatcgtctaaaaaatttccccataatccttcaaatggattaatgccaatcatttgcgtaaactcataggtttcatacgaagcatataattctcttgcttccttacgcaccgcttcttctagtttttcaggttttaaattatatttctcacttgcatatgtacatgttgcaacgaatgcttcttttacgcttttttgatcccaaagtagcgtgtcatctaagtcgaaaaataccgctttaatcatggatgtgtgtaccccctactgtttttgaaaaagtttaactattcttacactagattacaaggatacacacaataagtctagtgtatttgcaatttattctgtaaatttatttttataaagcgtcctctttacaaacaaatttacagaaataaaaacagctgatataatcactgtatatatgcaggaggttttatatggaatcgttagaagaaatgttcggcattcccaccgttcgtacaagtaagcgcttaagcagagtagttgccgcacgcttgcgcccttttgggattacaccagaacagtggaccgttttaaaacgcgtatcagaagctgaatatagtacacagaagcaattagctgagcgagcagataaagatcaagcgacgctgactaaaattttagatttactagaaaaacaaaattggattcagcgtgttagaaacccagaagatcgccgctcgttttttattcaaataacagaagacggcctgcgtttaaaaacagaagtgacgcctgctgtagaacaggtattttccgaattaacatctcagctaaacgagcagcaggtaaagatttataccgacactttacaaaaacttgaataccgcgccgaacaattgcttcaagacgcagaagacctgcgttaaatacccaaaaccccacagctaacattctgcggggttttaaacgtagttggcgatgcatagcacttctttgatttttgaaatcacttgtttggtttcatctgttaaagaggtaaatttaaacgcgatggattctgcatttggattaatgaagggttctttgttcgtgtctttgcggtagtcttcaatttgttctaaacaatattttaaaataaacgacaagttcgcacgtcgaaatctcaaactgacggtagaaggccatcttttttgaaactgattgcttccctcatactgaatcgctccgatgtagcgttctccggataaaaaagattctttgcttcgatatagctgaacggtttgggctgttccgctccagtcaatataaattcctgctgtttcacaaacttcgtatatgtaatgaaaaagctccgttacttctccgaaatggtagtgaagcggatgtttagccgtcataggtagctccctcctttatcgactttctaccattatattgtaggaaaagtaacttattcatttatacaacttatttcatacgcataagcagtaaaaatgaaaatatatgttttttagtttacataaaaatattataagtaattagcgataacccgattttcgaaacgcgtcgtataccgtatcttcttgaagtttttcaagataaacgttcgttgtagcaatagaagaatgccctactacttgcttcacaaccgcaagcggaacgtcattagctaaactgtttgtaataaaggtatgacgaaaccaatgaggagaaatagacgcgtttccttttactttataaacagctgatttaatcgttcgatacaacgttgtataggataatcgcttcttttcgccggtacgatagtactctttaatggagtaaaaaagcgggtcggtgtcaaaaggacttagttcagtgctttcatttaacgcttgccggtaagtgaaaagcgtttctttcacatcatcaaacacaggaatcgttcgttctttttttcctttaccaatcacatctacaaccaaatttccgcggcggtcttcgcggaagcttccccaatttaaactcagcagttcacttgaacgcattccactcatatacaaaagcattcccattaagcgattgcgcgctttgaattccttttcatgctgacgaatgcgcacgactgattctaacgcatttacaatcacctgggcttccaggtcggttagctctcggtactcggtgcgattttgtttttccttgtcgctgtaatgtccttttgcaatagatggtttttcaatccacgtcgtatacagcgaaggataaaaatgagtaacgtgtccaaactctagcattcttctaaaaaattctagctttcttgcagcggtgcgattggcatattgattcatcatttcttcattaaataatttgacttccataaatccaatcgattttaatgtaatctctcgttcgtagaaaaaagacagaatcgttttcatgtcttgattgtaagatctgatcgtatgaggagaaagtgattttttgataatccgcattgaaaaaaagagctgaataaactcttcatctgaaacgtgcttcaaattcaaattgttatcttcatctaatagctctgcctcttcccactgctcttttagctggcgaaacgaatttttcacaggcgacaattcaaattcttccattttacccctcctaatgattaaaaacaaaggtatccctttcaaatgatccagaatggaatataaagattttttatcaattcgcaacaaatgccattaaaagtttttaaaaacctctcaaaactcaatttaaaaagcctgtttttaaagactttaataaaaaaaccattatatgtaaactaaattctattttctgcttatttctctactttatcatatgaacgcttgataaggaagagttatcttgcgttagttaattaaaggattttgagtgttttagacagcaatgttttagggacactagtaggagtttaagtaataattggaggtgccgaatttggataatcagaaaaatagattgacgtcatcagaaattacaagtttatgggcacaatacatccaagacaccatgtctgtttgtattagtaaatatgtgttagcaaaggttaaagattctgaggtttattctctttttgaatttactttagaactggctgaaaaacatttgcacgtgcttagagatatttttaaagctgaaaaattagatttaccgattggctttactgataaaggtgtaaatctagatgctcctcctttgtttacggacaccttttggttagtatatatacacgaaatgaccatgcatggattagctggatatacgtgaccattattatcaatgcaatattgatgcgatggacctttataataaatctattgaaattcttatatggaagctggaaatatttattttaacttaaaaaagagtatcgcagctaaaacgcttgtgaatggcttcaaacaagtaacgaaagataaagatatccatagctttatggagtaatgtttgcgcacagccattaagaatataaacattttttcttccttacttcaacaagaaaacctgcagtctccacgcttgatggatgctgaaattacaaattctgacgtagcccctttttctgataaactaatggtatttcatgcaggatttttgtttcatttagctactacatattatgctgcagctatgataactagtatgagaatagacatagccggacattgtgatgcttctattttaaggaatttaaaaaccatctcttcctttgggcgaataatgatcaaaaagggatggatcgaaaaactgccaagagcagatgatcggaaagaattatcttgatatcctgcgaacttatctataaataaaaaacatcacgctctgcgtgatgttttttaaagtgattcaattttagtcaggtgcagctgtttattgctgtaggaaacggtataggttcgataatactctttttcctgactttgaccgttcgttgtaattgaaatgacttctttcgtttgaattgtatagaccgcttcgttctcttcttcactcacagattccacgtctaataccgaataatcaacgagttcttctcgaatgtctctttcgtacagcattttcacaagctgcttttgatcattccacaaaacactatcccgctggatataaggctgtacgtgttcaaatttattcgtgttaatggactttgttaaatctcgtaaataatgttcaatgaaaatatccgctgtttcttggtcaactttttggatgttttttaaattaaaatctttttcttccgcctcttctttttctttttcaccttctttaaaatcgtcgattcgctgagaactatttttgctgatggcatacgttttattattctctttgaaaacgaagatttcttccttttcgcctttttcatttgtgcgggtagattcaccttgatacgaaatatcactagaaggattaattgactttacgtatttgatatattcatcggccgtaatgttgaggtatttttgatgataggtaacttcatcccattcgtttaatttccagtgcttattaacgtatttaaaattcatgtaaatggtcagtccgccgcttccttctttactaattggctcaatagccgagaccgaaaattgtccagcgtgattgttaataagttcaaatcgaataagatgagttacatcaggaaaaaagctcatattgcattctttgcagtaataattagtagaaatactttttagctttgttgcaattaaagatgaagttgcgtatggcgttaacgctttttttagcgtttcataatcagcagggttagattcattttcccattcgtactcttcgcctaattctttataggtacttgaaattttgttcatcgtctcaaccgcagttttttctgcttttttttctgatacaagatcaggcggaagagatggcttagcttgatcttttgggatcacttcatctgaggaaggttcggttggtttggataacttaactgtttctttttcttcacaggccgtcaaaaccattagcagcagtagaacgaatgcaatcgtccatttttttttatgcataaggtgtcctcctcaatgccgaatttagtctgtttttaaaatgatctttaattctcaaacgtatcgagcacgtaatcaccgcttggaattccccactttgcctttttattttgatctgttttagcaagtaatgaaatggaattttctttgagcgtaatgacaatggttcctttatttccttgtccatcattttcatattcaatggctgcttggttattttcgaagcgaatatttttttgttcaacggttgacacgcggattttgctaggtggctggtacgaatttattttaatcgttgcttccgagtttgatgtagcaagaaattgaatgataggagatccgttatcattgccagtggtccattttccatcgtagtcgtgtaaatctgttgtttgtgtagtgggagtttcagtgcttgcatttggtttagatgaaaagtcaaatggttctacactcgataactttaacgtatcgttttgataaacggctgtataaaggcggtcacaaattttagtataaggatctttacccggctgttttaataagctttcctcgtgggtttgtattttgaacacatggttaggttcttcataccaattgacaatatgaaacgtttgcttcttctgctcgatgccttggcgtgtgaaattttcaacaagaaggttttgctctttataaaaagaactgtccgctttcaaaaaagcttttaaatcatcaaaagagttttgatccactgcttttccaaacgctgaaaagtaatcagtcatccaggctgtaataaatttcccgctcattgcttctttatttaaatcaatcgattgaatgctttctacctgtgtttttggttcgtttagtactttttttgcatctttttctactatcattgtatttccgtcttttaatgtttcttcttgctgacaggctgataacagaatagatgaaacaaccgtgataatgattgtattacgtttgttcatcataattgccccttctttatctaatataaatgtatgtatattcttccaacaaacagacctagtatatcattctacaaaaaaacgctcaaccctttaatttcacaagaaaaacggcttgcctttacagcgagccgttttccctcctatttaatggatgcttcttgatatgaattggctgcttcttttttgagctgtctagagccataaaagacatagtaaataattgaaagaaggaaaattccaagaatcacataaattaaaggtagagaaacgccaaacagcattaaatttgttgtaagaacactgtattttatgatgctgtacaagcacagaatccctaatactaaggcaatgcttggcacgactgggtagttcactttaaaaggacgggataggttaggttcttttttgcgtaaaataaaaagagaaactaaactgatgcagtacatcatcattgctccgaacacggataagataataagtgcattggcaaacgttgcagatcctgcacaaatcacgccgattgctcccggaatcaacaaaccgccgacaggaactccttttttattcgttttagcaagaaatttagggaagtaaccatctcgtgcaagcgcataggtttgtcttgaaaatcccatgatgattccatttaagctagcaatcaagccgaatagcccgataatagcaacaacggttgaaatgccgtttccgtatacagaagacagcgcctgtggaagtggataatcagctagcttcccgcttcctccgccaagtcctgctgttacaaatagtgtaaacaacgttgcggttgctagagtaataatcgctccaataaatcctttaggaatgtttttcttaggattttccacttcttccgctgccattgctccgccttctattgccagataaaaccaaacagcgaatggaatagctgctagtatccctgttggcccgttaataaatgaatgatcattaaaaatatttgatgtttgtacatgaggcaaaccagctacataaaaaatagataaaccaattagtgcaacaatggtagctgtaagctcaatcaccgctacttcttttaccccgattaaatttaataaaacaaagaaaataaaggcacctaccgttgcgtatacagggttaacggctggaatgagaaaatgcaggtatgctcctgttgatacggcaatagcaggaggagcaaaaataaattcaagcaagcaggcaattcctgcgatatatcccccaaaaggtccaagtgctcttcttgcataggctgaaggtccaccagcttgcgggatagatgttgaaagctctgcataactgaacataaacgttgtgtaaaacaaagttacaattaaggttgcaattgcaagcccaataatcccgccttgttcaaacccgtaattccacccaaagtattgtcctgaaataaccatgcccactgaaatagcccataaatgaataggttttaattgtttttgtaacgccatacgttctcctccttttgatgtttagacaataagatgtacaccgcttgtttgctgcttaatcattttgtcaatcatggtaccgatatgtgcggctgcctcaataggaggcgtccctcttttatgaatattagaaatgaccatacgatcagactcttttttgcctttactgggttcatagcacatgtaagcactcattgattcagcactgaccagtccaggtcgctctccaatcaatagcacaagtgcttttggctttatgatctcgccaatttcatccatacacgcaacccgtcccccttttacaaaaaatgaagtcccgatatgaagtccatatgattgcagggagtcaattaaagctggatacacgtcgcttatgttttcttcgattgccttggcactcagtccatctgagactactacttgtacatcaggctgccgcacgcagtttttaaaaatttctttcttagcgttatctgctaataaccttccttgatccggccgttttaaataatgttcttttgactccacgcgtgtattcacagagaaaaggttaaactcggctaaaatatcttctgcaactactccatatacagagtctacggctgcagcatgatccgtgcgaaaagataaaacgtcttttgttagcggccttgttcctgtacggccgacacctatgcgggcaggggtaaattgtttaagtgtttcaagcggatcgcgatttgactttggtatcatagtaagcaccttccttaaatcaaattcataaaaatagttgggtctccggctctagatgtaaagcgcccgttgtccataatacgctgatcttcaagccacttttgaaataacggcgttggggtacgccctaacacattacgtaccgttgcaatgtcatgataactaagagactggtagtttagcatgcagtcatcagccatgggcactcctatgacaaagttcactccagctgttcccagaagcatacttaaattatccatatcattttgatcagcatccatgtggttggtgtaacacacgtctactcccataggcaggccgtgcattttacccatgaaatgatcttctaacccagctcgtagaacttgtttgctgttatataaatattcaggtccaataaatccaacaaccgtattaactaagaaaggtttatagtgacgggctaagccgtagcatctagcttcaagcgttacttgatcaatattattgtgagcttccgctgacagttcagaaccttgtcctgtttcaaaataccagcggtttggaccgtttgccgttcctttttcatgaattagcgctgtcgcttcatcaagcatagacagtgaaattccaaatgaatcattaccggcttctgttcctgctaaactttgaaaaatcaagtcggcggatgctcctttttcaattgctctcatctgactcgtcacatgtgataacacacagttttgagtagggattgcccattcattgattatattttttgtttcatttaaaagtgcgtaaatattatctgttgtatcaataacagggttaattccgataaccgcatctccaattccatagcttaacgcttcgtataaagatgctctcattccctttaagttatctgaaggatgattaggctgagctctagaagccaatactcctttttggccgatagtcgtttgacaagtagtttgcacttctatcttggcagctccttgaattaaatctaaattggacataattttagtagctgccgcaatcatttcgctgcttaatcctttgctaagtccaagaaggtcttctccgctatgctgatcggataaaatgtattctcttaaatcccctactgtccattttttgatcatatcgtaaacagatgaatcaatctgactttcaattaatgccgagacgttgtcttcatctgcgctgagcagcgggtagtttctgatatcagcaagtgtgatatcagctaggacttgctttgctgccattcgttctttcattgactcagcgctaactcctgctaactgatctccagaacgctcttcgtttgctttggccatgatttcttttaagctataaaatgaaaatgtttctcctaataatcgtgtagttttaaacatcgtttcctccttgtatatttagtagattacgatgaaaaagcgagcgttttaacggaaacggagatcgcttctccagctactggtaaccctagatcgatgtaatctccgtgcgtaaaatcaatttgatctaaacaaataatttctaactctttcctctgtttagctagtgcttgtcctaaagcttttgcaatatcttgttcgcatagaacaacgaggcacttagctcccttaaaacaagcaataaattcagcgcttattatttttgctaattcttgaagcatcttatagctgcagtaaggaaaatgagataaagcaatagcaacgggaggatcttctgcactgaaaatagttgaagcctgcatacatgacgctcgagctctttcttgaaacagctgctgattccacgtctcctcttgctgaacgggtatctctataatcggaatatttttcagcggcagccgcttcgacccaatatatacggttgatccgctaacctctgtattttgcataccagcaccaattacagtagcgcgcgttgtctcagcggcttgagatacttggatggattgaaaatgatatgctagaagcggaccaacgtctccatgtatggccacttcttccactgtttttggcttttgcttctccatcattgctcctactcctcctgaaaccatgatcgtttcggggtgtatagaagatcttgtatgaggagaaacgagaagcgtggaattttgattcagcgcttttacataattcacggtttcttcagctagtaattgacagatagacgagagcttttcaaatgttgctttttcaccttctcgcagtattaaagaattattttttaaaaattcagttaaataagatgagatgtaggttacaaaaccgtctgaattcagccgaattaatcttcctcctacatgcagtgtaaacgtttctatcacttttccattttgacataaagcgatgttagcagtgcctcctcctacatcaatattggcaattactgcatttgtttcagcggaacgttggattgctcctgatccttttgctgctaacattccttccaagtcagcgccggctgttgcaacaacaaaatccccagcatgttcggctagatagtgaaggatactttctgcattttgctttctagccgtttctcctgtaatgatcacagcacctgcctccacttgatctaaggagattcctgcattcttatactcttgttctagtagtaccgttaatctttgaacatcgatttcaacctcgtttagcataggggtggtatagatagaacttgcatacgttacgcgacgatcaataatttgacagcctggcagcgtaaactgattttgttgatttgctattaacagcttgcttacaatcagctttgttgtgcttgttccgatatctaaacctatgctcgttatccatttctgtagcatgctatcaatcccttatctcgtttgaatatggtgattatcataaaacagttttttgaatatttcactaactatgttatcaaacctgacacacttttgtgtaaacaaaggtgacaaatgacaaaaaagactaaatcttggtagatttagtctttttgcttatgatgagtgtgatttagttacaatcattcttgatgcggatggaattaacagtgaaaggataactagacatgatagcaacgacccaatcatcgaaatcccgttcatcgagaaagaataccataggacaggcattccttttggtgcagcaaatccccaaaatattaagcctgcaatgaaatggcaaaaataacgagcgaaacttcctataattaaagataaaataataaaaaagaaagcttttgatctttgattattagctaagtatcctttaatagaactagagaaaatcccgccaaatccaataaaggtaacagcgataacatactctataaaagcttgcaatggggttaaaatatatgcatttcctaaagctaattgcaatattccccataaaaatccggataaagctcctcctttgactccccatcgaaagcacataataaaaataggaaccatagagaacgaaatgcttacgcctattgcaatttttatagaaggtaaaagatcaattaaaaaagccaatgctgcaaaaatagctatttcaattttagcctgtaaaggtaatgctttattcacgtttctcactcctgtttttgaatcattcatatcaaacggtttacacaggagtaagcaaatatatgctactattcccacattcctgcgctagcgttaactaacaggttcgaagggtctgaacaatttgttcactctcagcacggcggctccccctgtggtacgttcggatatttatgtagtattatgacaacattcattataccatatgtaacaaaatagattcgagagatttcaaagatgtttctattttctgaatctattttttataatgacaatcgttttagtatttggtatacttcttttatgtcaattgaatataaaaaaccctcatcctaatcgatgaggtagaggtcgcagtttttaatagtaaagtaacggaaatgcagagaacattgaggatgttgcttgaaaggaaaaattgccgaagtttagatcacttctcggttgatttaagctggggctgtctccgaacaggaacagaactgtcacatcatgcgagtgatgtgaagagctatcttcacggaaggttgacgcggttttcagatttaaaagcgcgcacatatactgcgggctttttttatgttatcccgtctctttccgtacattcgaaaggagtatttatctatgcaagagcaacaagaattaaaacgtgggttgaaatctcgccacttaacgatgatttcattaggaggagccatcggaaccggcttattcctagcaagtggtggagcaattcacacagcaggacctgggggagcgcttttagcttacgctatcattggcgtcatggtttactttttgatgaccagcctagcggagctcgcagcttatatgcctgaagctggttcgtttagtacgtatgcatctcgttttgtagatccatcctttggtttcgctctcggatggaactattggtacaactgggctattacaattgcagctgaattatccgctggagcccttattatgaaattttggttcccaaactcttcttctattttatggagtgccctgtttttattaattatgtttgggcttaactacctttctgtaaaaggatttggtgaatctgaattttggttttcgttaattaaagtagtaacggttatcatctttttagttattggcattatgatgatttttggtatctttaacaatgaagcaccagggtttaaaaacttcacgcttgatgatggacccattcacggtggattctttactgtcttaggtatttttatggctgctggtttttcatttcaaggaacagagttgcttggagtcgcagctggagaaagtgaagatccggaaaaaacggttcctcgcgcagttaaacaagtcttctggcgcatcttgttattttatattttagctatttttgttattgggatgcttattccatacacagccgattcattagcaagtgatgatgtgcgagtaagtccatttactttaatattcgaacgagcaggtctggcgtttgcagcatcagctatcaatgccgttattttaacagccgttttatctgctggtaactcaggtatgtatgcttctacgcgtatgctgtggaacttagcgaaagatggaaaagcaccaaggttcttagcaaaagtaaataaacgaggcgttccggtgaatgctttaattgcaacggcacttgtcggtacacttgcatttggtgcttcattttttggagacggtgcggtatacacgtggttacttaacgcttctggtatgtctggttttattgcttggttaggaattgccatcagccactatcgttttagaagagcatttgttgcccaaggtcatgatttgagtgaacttccatatcatgcaaaacttttcccttttggtcctatctttgcctttattttatgtgctgttgttattttaggtcaaaactattcggcgtttatgggtgattcgattgactggtacggtgtacttgtttcttatatcggacttcctttattcttaattgtttggttaggatacaaatggacgaaaaagtcaaaacttattccgttaaaagaatgccaagtaacagtgaaaaaatacgaataaaaaaagctctctattcttttgaatagagagctttttttatatgatctgatcagcaaaatgaagagatatataggcgggctgatttttcataacaagcatataacctttgaggggacgattacagtaatcagcagcttctatataataaatacgctgaactaacctgcttaaatgggttacaaaagatggaaattgatgagtaggaatgttttggatgtagtctatgatttcttgcttagtttgaaggcccgaatgggtacattctaacagatgaaaaagcggatctgctgctatagtagatagttcagaattgtgtttgattctattcagctggatatgcagttcttttttggaccatctttttggaatagctcttatatgctgatattgaaaatgtgtattcatgatagctaacacctttcgtattaaaataataaaatgacttattattttaataacctttacacattaaactaaaacgttacaatgtgtaaaggtgtcatacatcttataaaataagctgataaaaaagcacatcttgccactgatcgaatttccagcctacttctttaaattctccgcaaaatgtaaaattaaattgcttatgcattttgacactgatatcattcccttttgtaattcctgaaatgacaacgtgatggttgagttctttagccaattccaaaatccgcttcataagctgttttccaatgccatgcccctgttgatttttatcaatataaatcgatagctctaccgtttgaatatacgcttctttatctcgataagaagaaagcgaagcatagcccgctactaccccgtctctttccgcaacaataagcggaaagagttcattgctaatatgattatcaaaccagctccttctttgctctactgttacaggcgttaaatcaaaagtagcggcacttgcttgaacagactggttataaatttcaacaagcataggtaaatcttcttctttagcataacgaatgatcatatgtacaaactccttatagtatagaattatctttattttacttcttttaagaaacataatctacataaaaaaccgatgtgcgcatgcacatcagttatgattttgagcatattgaaaggtttgaagaacttgaagtgtctcttttgtagaaacgaccgttgcaaactccccatgtaaagaagacaatgcgaatgtatgtacatcttctgcaggaagccttgtttttccatcgtaggacataccatcaaagcaagctgttgcatcgtttacaatgtacgtcctgtaccctagatttccagccatgcgggcagtcgtagagacgcagtgattagtagttagtcctattaagataagcgtatcatagccatttgcttttaaataactgtctagctctgttccaatgaagcagctgttcacgtgtttgcgaattaagtattcgtcttcttgtggaccaaacccttctttgaactgaaatcccttcgaacttgggtgtaaaggagaatctggattttccgatgcatgctgtacgtgaatgacaggataattttggcgcctccatgcttgcagtagcgtcagcatatgtttttctgcatctaggttgtttctttccccccactgtggtgaataaaacccttcttgtacatcgataagcagcagaactggccgggaacgtagcataagcatcatcttctttcgtctttattttaaaatggaaataacgtatgtgcacccatcaggaccggcttttgaggaatgaaccgtttgtttcggtaaatgtattcgatctcctgcctgacatagaaccgtatcatgttcaactgtaaagtaaatagatccttcaagtatatgaagaatttcatcagttggatgggtatgagatgggtgcgtttgaaaagcaatatcgtgctgtacttcaacgtatccggtatacgccggaagcagctctttaattacttcttcaaactttccgccaactccttttttaatagaggctttttttacgtccatgctgttcactcctttttaatttaaacggacactgtccggtagtatagttgttatcatcatgtaaaaaatattgcttccactctcggttttcctgctgtccataccatcctaactcagggtgagcagatacgtcatcatatgtttttaaccgatcgcggaccaccttttggatgtgccgccctatttttgaatctcctgtcataccttcaaacacccaccgaggttgaaatgtaatcataaatcctctgctcttacggcttttacgtaaagaatgagcaggcgtattacagacgacaaaaataggttctccgtgaaagcaaaattcccataatggatcttttggatcttttggaatgtcctgcggccatttcttctgatcaatttgatgaagaaacgtcagcgtatcccaaaacatcgtttcgtactcttccattgatcgttctttatgttcaggcttaaagaataacacaaaggatgtatagcgacctatggtcttgaacgtatctatgtattctctaagtgccaacgctacatttctaatatcttggtagttataaggagtagtcacaaatgaaaaccgcagtaaatcttttttaaagccttctacccctaatatacaaggaaatggattttcttctgacaatatatcgcttcggaaatattgaaaagcatcttttccccaaaatgggacatgcgttgactctaaaatctcattggctcgaaaaagcatttttgatgccattaaaatcctccttatggaactcaacgttacatgtgtattaaagaaaagaaagtttatgagcatttttaactaaatgccgattctaaattataaaactctaatctatatatatataagctactattggacaagttagaaaggaggctgtgtttgtggagtggtttttgattgctataaaacaaataattctaggtattagtctcgcagcaccggtaggtccaattaatatagagatgattaaaaaagggctgacaaaaggattttgggcttcttggctagttggtttgggaggcatgacggccgatattttatttatgctcctcattttaatagggttaacgccttttgttcagatgcatgctgttactgttttcctttatgcaactggttttgtcatgcttacgtttgttggctttcaaagtatgaaacaagctgtttctcgttccttttcaatagatgtaaataaaccctctattaaaagagataagtcgttttttacaggtttcttcattgctcttatgaaccctttaaatattgtattttggtttggtgtatttgggtcaagcttaagcgaaagcctccaaagtcaaacgtggctatcagtcttttttcatagtttctttattatctttggaatccttctttggaatttaaatattgccagcagcattcatttcacaagaaaatttatcacgcctaaacttcttcgcttcattacgttaggtgcaggttttttactttttttatttggctgccaattcggttttaaatgtatatccttacttataggctgagctttgagcgatgagttcaataagagtgtcatttactttctcacgttcatcataaaaaagaccgtgtccactattttcaaatggaagaagtgtagaaaatgaaatatgacgattcataacttttgcaagatcaaatggacaaatttgatcttttttcccgtgtaatatatatgtctcagcaaaaatttggctcaaatcttcccgtaagtcttcgtctcgtaaagacaccgcagttttaattgttccatgaccggatgcctctaaacctaaatcttgaaaccaccctttaaaagctgagctggtaggctgattaaaaaactttttgccaaactcttcaagcatgttagggcgatctctatacgtattttgaataattgtatttacttcttcagaaggaagtccatatggaaaatcagttttttgaataaagcttggagccgctgctcctaataaaattaacttcttcacgccatatcctaaatgtctgctcatatatcgaatggcaatggctccccccatagaaaagcctacgagcgtataatttttcagctccagtctttctactaacatgcgaatatcatctgctaattgattataagaatagccggtgaaaggcgcatctgactttccgaatccgcgaagatcaggagcgatacatcgaataccgcaggccggcaacgttgtaaattggtattcgtacattttagcgttaacaggccacccgtgaaggaaaagaacgggttccccttttccaatatcccgtacaaaaagtttagtcttaggagttacgtgaataaaatagttcatctataacacctcctagatgttcttatatatatatgtttaggacaattggaacattcaaaagtttcttataagcttgtgtaggaggtgcatgatgtttatttgggataaggagtagggaaatgtttcttattgtttatttagaacatagtttaatttaaaaatattgaacaaaaaaagtagtaaagcgttaaaaactttactacttttttgttatttttcttccagccacacatcaactaaattgccggcttcgctttggtccaatacgaatgaaccgttgctgtatcggtcgctagctcgcattgtagatggatcaacctgctcgatttgacctttagatgattctactatcatgtaatgttctttagagattgcttttacttttgcaatttgatgcggattagattttagttctcggaccatcactagccctcgttttgctcgtgctgattcttcaaactcagtaatttttgtctttttcacagctcctcgttgcgtggcgataaataattcagttgatagagcttcatcttcatcgaagataacgccgcttacaacataatcatcgtcttttaagttaattcctttcacaccagaagcgcgagtccctacaatattaatttcttcttcccggaaacgcagtccgtagccagagcgagtggcaataaacacttgttttttaccatcggtttgatatacatcgattacttcatcatcgccttttaaattaacggcgacaagagctttagagtagcgctgtgctttatattgaagtaattctgattttttgaccataccgttttttgtaaagaaaagcaaatactggttttctttaaattctttcaccggtatcgcccgtacaatttgctcttctttatcaattggaacaatgttcatgatatgctgccccatgtctttccacctgatatcaggaagttcgtgcactggcatatataaataattccctttgtttgtgaagatgagtagcgtttcagttgtattaatttcatacttcgctaaaattcggtccgtatctttcataccgaagtcttgcccgttagacgcggcgtaagaacgaaggcttgttcgttttacgtatccgtcttttgtgactgtcaccatcacttcttcagatggaaccatcacttctagattaatcttaatttcttcgatttccgcttcaatttttgagcggcgttctgtactgtattgcttctttacacggcgtaattcttttttgattacattaaaaagttttttctcgctatgtaagatttcttctaactcgttaattttagcacctagctcttcagcttccgcttgtagagctgtgatgtccgtgtttgtcaaacggtataattgaagcgatacaatcgcctctgcttgaggttctgtaaattcatatttggcaattaaattattcttagcgtcgcgcttatctttagaagctctaatcgtcgcaataacttcatctaaaatcgacagtgccttaatcaatcccgctacaatatgttcacgttcacgtgctttttgcagttcgtatttagaacgatttgttaccacttctctttgatgatcaatataagcatcaagaatgttggccaagctcataagctttggtcgctttttagcaatagcaaccatgttaaaattataaggtacttgcagatccgtatttttataaagatagtgaagtactccttgagcatttgcatctttttttaattctactacgatgcgcagaccggtacgatccgtttcatcgcgaacttcagcaatgccttccacttttttatctaaacgaagctcatccattttcttaacaaggttggctttgtttacttcaaacggaatttccgtaatgacaatttgctgttttccgccgcgaatggactccacttccgtttttccgcgaataataattttccctttacctgtctcgtaggctttcttaattccgtctaccccttgaatgattcctcccgtaggaaaatcaggaccttgaatagccgtcatcaactcttcaattgtacacgttggtttatcaattcgcatgatcgttgcgtcaattacttcacctaaatgatgaggaggaagttctgtagcataaccagctgaaatacccgtggatccattcactagcaaattaggaaacatagccggtaacacagttggttcgctacttgtatcatcgaagttagacacaaactcaaccgtttgtttgtcaatatctcgtagaagttctgcagcaatcgatgaaaggcgagcttctgtataacgcattgctgctgggggatctccatcaatacttccgttgtttccatgcatttcgattaatacatttctaactttccattcttgactcattcgaaccatggcctcatatacagatgaatcaccatgagggtgatagttaccaattacgttccctacagttttggctgacttgcgaaagcctttttctgctgtatttccatctacgtgcattgcatataaaatacggcgctgaacgggttttaacccgtctcttgcatccggaagtgcacgctcttgaataatatatttactgtatcgaccaaaacggtcgcctagtacatcctcaagaggtaaatctaaaaagcgttctgtttgtgtcattgtacgtcctcctctgcgaccgttaatacattttcattatctaaaatatttggatcttcttctaatccaaacgctacgttgctttcaatccattttctgcgaggttctactttatcgcccatcaaagtggttacacgacgatcagcgcgagcagcatcatcaatacgaacacgaatcagcgtacgcgtctctgggttcattgttgtttcccaaagctgatctgcgttcatttcaccgagacctttatagcgttgaatcatataccctcttcctaccttatcgatagcaccctgcaattcttcgtcactccatgaatattcaaccacttcttttttacctgaccctttacttactttgtagagcggtggaagagcaataaatacttttcctgcttccacaagcggtttcatatagcggtagaaaaacgttagcagaagcacttgaatatgagcgccatccgtatccgcatcggtcatgataactattttatcgtagttaatatcatcgatggtgaaatctgctcctactcctccgcctatcgcgtgaatgatcgtactaatttcttcgtttttaaaaatatcttgaagcttagctttttcggtattgataaccttccctcgcagtggcagcacggcttgaaagcggcgatcccttccttgttttgctgaacctccagcggaatccccttcgactaagtacagttcgtttcgctgaggatttcttgattgcgcaggcgttaactttccgcttagaacggtttcttgacgctttcgtttcttcccgtttcttgcgtcttctctcgcctttcgtgctgcttcacgcgcttgagcagctttgattgctttttttacaagaagagagcttacgtccgggttttcttctaagaaataggcaagtttttcagaaataactgcatctacagacgaacgagcttcacttgtacctaactttccttttgtttgaccttcaaactgaagcaactcttcaggtattctaacggaaacgatggctcctaagccttctcgtatatccgttccttctaagtttttgtctttttcttttagcaggcttactttacgagcatattcattaaatgcacgcgtcatagcgctttttgcaccggactcatgcgttccaccatctttggtacgaacattattaacaaatgataaaatggtttcagaataaccatcattaaattgaaaggcaaattcaacttcaatattatgatgaatcccttcaaaaaagacgactggatgaagtgaatctttttcttcatttaaatatgaaacgaaggcttgaatacctgtttcataataaaagatatcgtgacgatcatgtcttttatcgattaactctattttgaatccttttaacaggaaagccgattcgcggagccgttcacacagcgtatcataattatacacagttgttgaaaagatcgtggcatccggtttgaaatgaatcgttgttcccgtttttttcgttttccctattttttctagcgtcgtaactggctttcctccattttcaaaacgctgttcataaataaatccatctcgatgaatggttacggtcaaccattcagacagcgcatttacaacagatgcacctactccgtgtaagcctccgcttgttttatatccaccctgtccgaatttacctcctgcatgcaagatggttaaaataacttcaggcgttggttttcctagtttatgcatgcccgttggcatacctcgacctttatcttgtacagaaattgaattatctttgtgaatggttacaataatttcttctccgtagcctgctagagcttcatcgacagagttgtcgacgatttcatatactaaatgatgcagacctcgtgtatccgtacttccaatatacataccaggacgtttacgaacggcatctaatccttctagtacttgaattgcatcttcattataattaaattgttgtttccgagccattcatactacccctttcatcacaacgaacattactacattatgtatgaaacacaaacgtttgcgcttcgtgtctaagaataaatgatcatgtatcctatcttttaattttatagtgttcgcatcaacagaacgtatgtttctatttttgcgtacttacaagattttagcacaaatttccgtattataaaagcaatatcttgtgtattcatggattataagcattataaagctagctgtctaacgtctattgtagcggaaacgctcttactatttcaacgcatggtgaaacccatgcaagcagtgtgcatgggttggttgttctgcttatagatcttactttgttaaagcatgctcaacttttatacaacgatccataactacagtatacccttttttagcgagcaggtcatatgcttcttcattaattaaaccagattgtgcccaaaatacgtctgcgtctacttctaaaaactcttctgcaacttcaagcaaatgctcagagcggcgaaatacattaacgatatcaatatgtccttcaatttcttttaatgaagatacagcttttacgccgagcgctgagtttattgtcgggttcaccggaataatctcgtaaccttgctgctgcatggcttctgaaaccatataagacgttcgatgagggttatctgataaacctactacagcaatgcgcttgcttttttttaatattttaccaagctcttggcgggaaggaattttaatggacatgtctattacctctcttagctatataatatgtactgaacaacattcgcgatttacagttgatttcctgcatatagtacccgttttctctatttttgtaaacgtcttctttttttaaaataattgtctctcacctaaaactagctatgtttttttaagtatctcatggtaaaatagaaacgatatagaaataaaggagctttcaaacatgaattatttattacctattcttgcctatatcttgggctctattccttttggactagttgttggaaaactaggatacggcatcgatatacgagagcatggaagcggcaatttaggcggcaccaactcctttcgtacattgggcgtaaaagctggaattatcgttacgcttggagacattctaaaaggaaccctagcagcttctttaccgcttttatttaatacgaatcaaaacattctcttcattggtttatttgctgtcattggtcatatttttcctgttttcgcgaaattcaaaggcgggaaagctgttgccacgtccgccggagtgattttatgttatgaacctcttttatttgctttcgtactattatgtttttttatctgcttatacataacgaagtatgtatcattgtcctcaatggttaccggggtattaacctttatctacacgctatttaagcaagactacatgcttattatgattattggtttaattgtagcctttgtcatttacagacaccgtgcaaacattacccgaattcttaataaaacagaaccgaaagtcacatttttgtcaggtaaaaagaaataagaggagcttcctcttatttctttttttataaccgatttgtaagcgaatacatttcttatttattagttatactgatactaaaataaggaggtgaatgatgtgaagaaaaaatgccctatttgcaaacgaaataagaaaatggattcacagctagaaggaagccgctactgcgttcactgctgggaaaccattggaaaacaatatgatttcaaatgaaagaatgaaacgatttaatatagaaatgaagccttcacctctatattaaatcgttttattttattttatctcattccttcctagctggattcgtatatattggtaatttatctacctttctactataataagtgtatccgcagtattggaaggagcataattaatgaaattaacagtaacagaagcagcagctacgtggtacaaagatgaaatgatgctagaaggaaacgaaacaattcgcttttttgttcgctacggcggatgcagcaacgttcaaaaaggtttttctttaggtgtaaacacagattctcctaaaaacgttggcgttgaaacaaaagttgacggtttaacattcttcgtagaagatgaagacctttggtactttgatggtcatgatttgaccgtaaattataatgaagaaacaaaagaacctgactttcattacgaagcgtaagaaaaaaagcatcgatttatcgatgctttttattcttgcgcttaaccctgctttttggcctcttcataggctttatgccattccggataattacggcgaatcgaaatgggcttaaagttttcttttttcacacatacgtgtgacgatgttcctgttaacgcaagttcttcatttgaattaaaaatttcgtagccgtacacaacgcgtagaccgtcatagttctcaacccaagtatgtactacagctgtctcgccataatgaagcggctttttatatgaagcctgtatatcaataactggcgacagcacaccgtctctttccatttgtgcatagctaaaacctaaatcactaataaactgcgttcgacctatttccatccatactaaatagttagcatgatacacaacgcccatctgatcggtttctgcatagcgcacttcgatttctttcgttgatactaacatgattttacctcctcttgccctgttcctgttttatcttaccatataaggagaatatactcctactagtttggttgtaactcaatatgttgtaagactaagcgcattttgaatgcgatatatcagtgtttccagccgcgtcattttattttcatactttttataaggaagtgtatatgtgtagtctttatttgtccataaacggtcaaaataagcgtttagttcggtcataacctttttgttagaaggtcctgatactttaatatccgtttctaagttcaagtcagccaaatttcgttttgtgaaatttgctgctcctgcaataatagttgcattttttttatttcgaataaataaagttttgggatgatactgctcttttcccgtatgataccagcgaactttaatatcgcctttagattttttcacaagttctgctgctactggacggttaggcagtccgaacttttttcttccaaacgcattctcattaggatctaaaattaatcgtacgtttgcgccttgtttggaagctttcaaaagcgcctttattacgtctcgatctccaagataaaacataccaagccatacatcgtcgccttttttagcatgacgtaaatcatgcaatacgtgcttatagattttgccttctgttaacagctgaacatagaggtctcccttttctttttctttcttcttataccgaggtaactttcctccataagaaaaatctgacaccgcttgttcacttttcaccacatctccaataatattcccttttacttcaaaggccatgttagaattataaaaacttgcatcatgaggattggcagaggagataataacgctttgatctgttgctactacttttctgtgattagcttttacatttaacaactttaaataagcacggaccgtcgctttaggcgcattggtaccaaacggatttgttatccatccgtttcctttttcaccaaaccactgaacaaaagttctccacactgaagaatacagtggaatggagtctctgagcttagataaattggtttgcaccactttgattccgtttagccgcagtgaatctaaccactttgaatcatgtgagccgtaggttgtattgatttgatctgtaataaagacgatttcgatagtaggatgttttcgtttcttttcaatcagcttacttgcaagcgtatcactaaggtgaggaaacgtttcgccttggttatagtagccgttaaatagaaacatatccataataataaaagcttttgcgtcatcaatcgcattcgtaactgcttgaaaaatgtgttgttcagaaacagatgtctgctggtcttgatacgttaggtctgataagagaaatacatcttctactttgtgcggcttactttcgtatgaaactcctttaggcaaaggcttatgcgtttgataagagcccacaataatcaagacgacaagtaaactgaccaaaatccttactactttccttttcacgtgctttttcacctacataaacctctttgctagtttgtattagtattgaccttactaaaaaaatatagaaagaaagcagctaaaaccgtttatttttagctgcttattgtcgttgctttatttattaaatcgtaccttcgtaaccattttgacgagcttctgactcatcttttatttcgctgcgcattgcttcgatacttacttcgcgattgtgatttttttgctgaatgcgctgacgttcttcttcattgctgcatgcagcagcttcttctgcttcttcaatgttcttcattgtattttgcaccattgtttgtaatttttcaacgttatcactgcgatcgtctggattcggtttattccatgccattgtatcttcctcctcaaaataactttgttacaattgtagtatgccggatttgttcatctctataagtggaaaaaaatgattttagtttacataatataattataattaagttaaaatatgtatataaaacatacataatatggtaatatttacatacaaagggggaatcgctatgaccaaacgaatgataacattactaagcgtcatctttattgcagtgcttgccgtattttttatgtcacaaacctcattggcatcaaaattgacagcaagtgcctttatgaagcctcatcattactcaaaacatgaagaaaaaatgttagctgtgacaaacctggactacaaaagcaatatcattgcatacgatgtgaaagctcctagtgacgcaaaagaagcttatgtaaaagctacttattacgaaaagggaaaagcaaaagaacctttattttcaggagggttgactgtttcaaaagaatttgacatgtttgctattacatataaaatcgatgatgatgcgcataaagttatgtttaatgtaggaagcaacgatacaaacctaggaatagaagcggaaaagccaaaaaaaatgaacggatattcctttactggattagagaaaaaacaaacggtaaaaatgaataaaacatatccagttgctgctttatttggtgacgatggcagtggcatacgagttgctccgctttcaaccgacgatggagaagtcgttaaagagcttatttcgagcaatccttacgtttatttattcacggtagaattcaaataataaaaagtcgctgaattcagcgactttttattcattcacctttggtttgaataacttgaggatgcttgccggatgtatcttgcatttgttttccgttatttccaccagcttctctcggttgagtgccgatgtgattcggaacaaaaggtttgctttgttttttaggatttcccatgcttatcccctcctcaccgttactctaaccaacttactttaaagttattcagctctttcaagcatacgatcttctaaccgcttttcaatttccatttcaatgcgttcaatttctgactgatcttttaacagctgcgttttattttcttgcactaactcttcaaatgaacgtttgcgcaattttctcatgatcacaacacctactttatgtaatttttatgaaaaatctgaaaaatctaaagaaactgatatcgtataactatctatattgtaaccaatttgtcagataagtaaacatactttttttgaaaagttgtaagaaagtttgacatgtttactgacctatctatatatacgatgataaagtaaataagtttcatgtttaataaaacaagcagcgaagttaattcgctgcttgttgagcaaagttttccatttgtttaagcgtcattggaccattcactcgttgaacaattttcccttcttcatctataaagtaagatgtcggaatggtggagactcgatattttttacttcctacactatcttggtcgtccaataatacacgaaacgtaaactgtttttctttaagaaatttagatactgcctgtttactgccttccgacgaagttaaattaaccgcaagcagctgtacatcgtttccatatttctcataaaacgcttgcatatcgggcatttctttttgacacggcggacaccatgttgcccaaaagtttaaaatgactttttttcctttaaaatccgataattgaacggatttcccgctcgtatctgacagtgtaaacggaggcgctgtatcttttggttccaacccataagcttgacccgaagcctgacgagcactatcgccttttttgatatttaaatccttgtattcgcttaagttagaattatcggatgcttcatttggagaaagcccttgccaaagggcgtagctaagaaagcctactagaagcaagaccgcaattatttttttaaccatatgatcggctcctttatttcttctaaaaagtgataatctatgtactaatagatatgtgcaatatctactaaaataatccttttatagggcattttcttttataatatagcatattcccctctcactttttgtcgaaaacagtgcgtttgcataaaaaaagagcggctcacgagaaccgctctttttctttataacttacgcatgtgttttagactgtaatttatcacgaagcaccatttgaaggataccaccgtggcgatagtaatcaatttcaacttcactatcgaaacgaaccagtacttcaaattcttttttgtttccagcttcatcagttgctgttacttttataaaatcacgtggttttactgtttcatcaactgctactgcaattgtttcttttccagttaaacctaatgtatccgcgctttcaccatctttaaattgaagaggtaaaacacccattaatactaggtttgaacggtgaatacgctcgaagctttcagcgattactgttttaatacctaaaagatttgttccttttgctgcccagtcacgagaacttcccatgccgtaatctttgcctgcaagtacaacaagacctgtatcttgctctttgtatttcatacaagcatcataaatgctcattacgtcatttgttggccagtacgttgtccagccgccttctgtaccaggagctacttggtttttaatgcggatgtttgcaaacgtaccgcgcatcattacttcatggttaccacgacgagaaccatatgagttaaagtcttttggctctacaccgttttcttgaaggtaaagacctgcaggtgatgtttttgcaattgaacccgctggtgaaatgtgatccgttgtcactgagtcaccaaatttcgctactacgcgaagatcatttaacggctctacttcacctggttcttctgataagccttcaaagaaaggtgggttttgaatgtatgttgaatcattctcccacgtataaagcgcatcttcgcttgttttaatttcattccagcgttcgttatcatcgaatacacgctcatactcgttacggaataattcaggcgttacggtacggctaacaacttctttaatttcatcttgagaaggccagatgtcgctaaagaatacttcattgccgtctgtatcaatgccgattggatctttttgtaaatctacatctactgttccagccagtgcatatgctacaacaagcggcggagaagcaaggtagttaccttttactaatggatgaatacgtccttcaaagttacggtttcctgaaagaacagacgttacaagcaagtcgctatctgcaatcgctgcttcaatttcagcttctaatggaccagagttaccgatacaagtcgtacagccataacctacgatgttaaagccgattttatctaagtatggaagcagccctgaattttgcaggtaagccgttactacttttgaacctggtgctaaagaagttttcacgtaagctggaacatccaatcctttttctaccgcttttttcgcaactaaaccggctgctactaatacgtaaggatttgatgtgttcgtacagcttgtgatagccgcaatggcaatggcacctgttttcattgttgtttctgaaccgtctgcaagcttaaacgtaatttctttatccacgtctttagcatcaagtccgaagctttggttgctaacaggagctgttaaagccttcttgaattctgtttgcatttgagaaagtggaattaaatcttgcggacgctttggaccagaaagatttgcttcaatctcagcaaggttaatctcaacaacgtcagtgaaaattggatcttcattttctggtgtgaagaataaaccatttgcttttgtatattgttcgacaacctgaatgtctttttcatctcttcctgttaaacgcatgtatgctaatgcttctgcgtcaactgggaagaatccacatgttgcaccgtattcaggagccatattagcgattgttgcacggtcagctaatggaagttctgctacgccaggaccgaagaattccacgaattttccgactactcctttttgacgaagcacttgcgtaacttttaacgctaagtctgtagctgtagtgccgtttggtaattcaccaacaagtttaacgccgattacttcaggaactgggaaataagaaggttgaccaagcatacctgcttccgcttcaataccgccaacaccccatcctaaaacaccgataccattaatcatcgttgtatgagagtcagtacctactagagaatcagggaaagctacaaattcaccatcttcttcaacagcatgaacaacgtttgctaaatattctaaatttacttggtgcacgatacctgtagctggtggaactgcgcgatagttattaaatgatttttgagcccagcttaagaaattatagcgctctgtattacgttgaaactcgaggtccatattaattcgtaatgagtcagctgtacctgctttatcaacttgtacggagtggtcgacaacgaggtctactggaatttctggattgattttgtcaggatctcctcctaaatcagccattgctttacgaagtgacgctaagtctacaaccgctggaactccagtgaaatcttgaagaataacacgagatggtttgaaaggaacatcgatatctttaatatcttttgttccccattttgcaaggttttcgacatgttcttttgtaataacacggccatctacctgacgaagaacagattctaataatactttaattgaatacggcagcttagatacattacctaaacctgcttcctctaaagcttgtaagcggtaataattatatgtgctgccattaagatcgaatgacgaacgagcgttgaaaacgtcttttttagtcattgcttttacccccttaaaattctatgtataaaggatttacttaccccatcctctattcccttcaccatctatcttaatataatattatacataagtaaataaaaagaatgttattaattaacataagtttcacttataacctttttccatcttccttttatttttctaataattcatatttcattgatttttacgcatgctagaaacggaggtgatttaacatggctaaacgcaagtcaaaccacgtcattcctggagctaacgcggctagcgctcaaggaaaaggagcgggttataatgaagagttttcaaatgaaccattaacggaacaacagaaacaaaataataaaaaacgcaaaaaaaatcaataaaacaatctcttattggatatactaatcactagttagaaaagcaaaatcgtttaactccatgaaatctaacgagaaggcgtcattatatgtgacgcttttttcctgttcccatttcctgtttttgttaaacctatttttagaaaggggaatttttcatcggataaattccctgtcactatcctaccctaataaatgaaagggaggctttaactatgaacaaaaacagcagtaaagacatcagaagaaatgcgccaaaaagcaattctggacagccagaaccgctaagtggatctcataaagtgaaaaaccgtaagcattctcgccaaaaacacaatagcggacatgatatgtaaaacagcggcaagctctctacagagcttgcttttttatgcgtagacaagacagctagtacttcaagcttattctttgcgcaggagttcactaagtacataaacgcgcatatgatagtaaagtgaaacactttaaataatggaggaacgcagaaatgaaaaacaagcgtctgccagcagaccaaatgtttgtaaaaggctttcaagagttattagaagtcatgctttcaaatccctttatgagttatttagattatgattccgttcgtatagatttatttgaaacagaacaatcatttattgtcgaagctgaattattagggtatcaccctaaggatattatcgttcagatacaagctgaccacttacagctgacagccaaaaaatactgcattagagaatttcatgatgaaaagcaaggaacgcttgcaagagaacaaatggaagaaagcgttgaacgtacaatcgactttccatttccattgatgaataaaaaaattaccgctacatttagtaacgaaatccttgaaattacgatttctaaacatgagacaaataaatctaatcagcaaatagtccctatcgagttccaataaagctgcagatgttgtctctgcagttttattggaactatttaatcgtttatttagcacatagttttttaagaatattcttcttttcaaaacaatgggatatctaatttattttacggcacactactaaaaaagagtaaaaggagaacgtttatgcttcatactgcttggaaaggtaaaatcagctttggattaattgatatccctattaaactgcacggagcaattgaagaaaaagatgtaaagctgcgcacgctacactccgtttgccatacacctattcatcaagaaaaacattgccaaacgtgtggacgagaagtagaatccgatgaactggttaaaggatacgaaaccgcgaccggtcagtttgttgtactttcacaacaggaaattgacagtgtcaaagaaccctttgcagcaaacaaagctgttgaattgttacactttgtatcgttagatgacattgatcccctgttttttgataagccctactatatttctcctggggaaacaagcctaaaagcttattatactttattaaatgcacttgaaataacgaataaagtcggtattgcgaatgtatttttatattccaaacagcaaatggcaattattcgttccgtgggcggatctcttgttcttcacacgatgcattttgaagaagagcttcgttcagtcacagatgtgcctaacttatccagtacttcttccattaatgaaagtgatacacaagtgacggtggaattaattgataagctatctacttcttttaatccgtctatttacaaaaacaactaccgagatgccttacaaaacgtcattcaacaaaaaataaatcaaggcgaagttacaaaaggcagcggaagcgaagaacgagatattcgacatttaatggaaatgttaaaagtgagcatagatccttctactttacacccgacaaaatcaacagcagagaaaaaaacttcatccttaaaaaagaaagcataaaaaagctaacgaatttcgggactgacccctgtttttgagacagggatcaaaacaccttttaaacgaccagttgccgatattgtacaggtgactggttgtttagttttgtttgaatacgggcattgttatagtaagtaatatagtnnnnnnnnnnnnnnnnnnnnnnnnnnnnnnnnnnnnnnnnnnnnnnnnnnnnnnnnnnnnnnnnnnnnnnnnnnnnnnnnnnnnnnnnnnnnnnnnnnnntacttctaccggataactgactcttgtccccatagaaaaaacacctccaagttattgttaggtactacatacccgttttttaacttaaaggtgttttttatttgtctcactctagggggtcagtccctttcttcgttagctttcatttgcaacagaagtcttaggaacaatagttccatatgacgccggtatttttaaatattgcgttacttgattattttctacaaagacaataaagttatcttttttatcttttccaataccttttgcttttgcttcagaccacgtgaagcccagcttttcatttacctcactgcgagtcgtttccggtccgaaaacatatactttgtcccatctaaaatcacataattcattaaaatcaaggatggaagcttcttctttactttgatttgtttttttaatttcattaattacagtttgctgaagttgcgcttggttgcgttcgctgtataccctgtcaataaaaaaagttgccaatagcgctactaacgtgaatagtagaatctttttcacttcgttgtcctcctgaaacgttctctgcacatgatacgacttctttttgatacggttttattctctactattctagaaaattcaacaggaaaatacaactaaaatctcgaaatgtcatcaaaacataaaaaacttaacattatgtcaacgcataaaaaaagacttgttcactttctacctattcacctactcagcgctgaaaaaatgtggttctaccgtacaaatagcttcaataaattcttctactaacccttcttctcccggcaaaaaaggcagcgcaccaactccaacacattcaatacttttataaaaatgatgctgcttatagccctctgctttccctggaaacagcacaatcgctgtttgtaccggctttattccattttcctctacaatagcgtctcggtaacgatgcatggtattaatatcttcttctctaggtgaaggcgtatcgtgatttggtttgatacgatacttagcgtcaaaaagatatacactttttttctccccttgctttacttcaagcagtaagtcaggcttttgaataacggtatgagtatgatggtatgctttctgataccatagcgtgacttctgctttccccactcgaaaacgatgataagacggctgcatcctaacgttcaacccttgttctgtcgttgtcatgatgttttgttctatccgcttgccgtaagtttgcaacttctttaaaagactaacatacgtccagtattcatagagagttgcgatatcttttaatgaaaggtggtaaaactctccgttaagagccaatcctcgcgttaagaacataaagtatctgcttgcttcccggtagcggggtgccgtacgcagtgtagaaggaagaattgaagcttgtagggtcttcacccgttgccaaaacgcattatttaacagtctttttaattcggcatgattagtttctagagccgatacggcttctttttttacatatctatcttctatcaatttgtcaattagtgcagttagcttatgatacagctgcgtcatcatccattttacactttgattttccagattatcataggtagacacgtgcctggtgccaatcgcttttgtgggtactacttttatatttcgattaattttaatccccctgcttgaagatgcaagataggtagggtgggttcggacaaatgatatagcacggctatcttgtttttttatttgatcgcctctcatgagctcatgttcaacttttaccgattgaaatggctgattttcaatctgacgcacagaatgaagaaagggtttcatatagtgagagagaacatgataaaattccgtccatgttgcttgcttagaccaaacagattttgcttcaatatatgttttacgaagcatatcgtatgccaaatcatgaatatatccgttcacttcatcaaccatgtgtacataatctgtcttgtagctcatctttgaggggaaaatttcaagagtaaaggagagctctttttctctttcgctgtaaacatgaaatgtagaataccctacttcattttgaaagcttatatttcccgtcaaaatgtagggaaatcctacgctttgaaagctttgttcaactgcttttgaatcgtggttaacaaacaggcttgtttcatttttagaaacaactgtaatttgataggtttcattttcaaaaaataaaggctcaagcggcggttttgaggtcatcatgccttttgtttgatttaatacttttacatgtgtaattccttttcctgtacaagaaaaaaacatcacttcttctgcagattttatttttttcttatttttcccttttataaccaccgtacacgtgtcagtttcaatttcaacgtacggtattaatccaaaatgacgtgtatccgtatacttcaaaacgtctcatcatctccattattttgcgtgcgcttttaggaaatctcattccatctgcatttacgacagctgtctcaaattcatcatctaacagcgtatttgtacagtaataataaaggttttttaataaatcaaatgtgtacccatcgcttcctgaaatacgaggcaaaactttttgcaaaacctgaaaatcgaacgcctgatcaaatgtaaacattccgcttttcaccgcgtaaattaaataaaagcatatttcgtcgcgtacgcggtaacctatttgcaaatcgacttctataagcatctcgttgacagttagcaattcatttgttacttcgtgaatgagctcagcatgttcaacatacgcatcttttaagtgaacatattgactttgaatttgtacattttgaatgccgtgctgagacggatctctatcatctaaaaaatcaaaagaatctagttgaatcttatttaactcaattgtgttggtacgatctaacaacttttgactaaacccatgagttgtttcatccatattaattgtaccgataatgagaagattggatggcaaataaatatctcggaacatcttatgtcccgggaataacggagccgttttgattttctcttttgaccagctcctgctttccatcacgcttaaaatgtcgctaaaataatgctcaactcgagctaagttcatttcatccaatatggcaacatatgtgtaagctggatgctgaatggcttgctgcataatcgacagaaacgatcctctgcgaaaatctcctcttaaatcaatatatcctaataaatctgaactatcgtgccaatcgggtcgaacaggaatgagcacttgtcttccattttcaatcgtggcaccgatactatctgctaagagctgagcaagctttgtttttcctgtcccgctcattcctgataaaacaataaacggtttggtctttaaagcaaagtaggcgttggctatatcatgtcgttcatatgtaaatccagatttcctaatatactcatgaatatggacgatggcgtctttgtcccccatcatctctttgctcattccgtatgtttttatatactgttcatgcatacttaacagtaaatgcaagtcctcttgcagctgatcattgctaggtaagtctgctatattgtaaggaaggtaaagagctactctatcctcaaagcttttcgcttccatgcttgtaccaatgacaatatgattatctttcaatacgcgggcatgttcaggagtaaaaaatcgaatgtctttcagatctgttccttcttctgagtctcctctcaacatgactaagtaaatacgctgaccgtcttcactgaataaatacgcgaccatcacgtcactctctatattcttattcgcaagggtcacgtaaggaaatgtttcagcgtggtgtcccgatatacgcatttcttctcgatttatatgctccaatcgataaagagaaatcggaagcctgcgtgtaagcatattttctatttcatgttttacaagtacatctccacccatttgtttataatgttccgctacatacagcagccgctcgcgcaaactcatcgaattctctcctttctgccttcactgcagtttgtaaaaataaaaagcatcgtcagctgaccacgcaaaaggttcatttcttttattatagacgctttcttcgtatagtaagctattttataacgttaggaaacactacattattcttttctctacatacatgtttatgttcattttaatgaaacatgacagaaaagaaaagcgttaggggcttaatgaatgaaggggcaatgatatgaacagaaaaataagcagcttgtgtgcccaaggataaaacacccattatgctacatgattatttaacatctgatgcttttggctgagtaaagaaaaagataaaaataataagcggcagggcgataagaaaaatactcgtctctgaaggtcttactgtaggtatatccgttaatgacattttaatcagtcctttgtaaatttttcaactaagtcaggatttacataaaaatgttttgatacggtacgatgaaaaaactgagaggattgattcagttcacttaatgcaggttctgttttgggaacgccaaaaataggtccgcttacgttaatggtaaaccttccagaagaaataaaggcgcccgacacattgatctggttattaagcagcaaagccgcaagaaacacatcaatcatatcaataataatattaattcccacgtttccgtcttttccttcgatgcgactggttcctgtaataggtccgcctactgaaacacgaaaagctccgggtgtcacaaatactcctataattgttatttggccagttaataataatatggctgttactacatccagatctcgttgaatggcaaagataagttccctttctttgtcaaagccgcttttccattccacattctccacacccttagcacatactattctaaacacgtgtaagtgttattctaattctgctttttcttttctcactcgcgctccgaaaagtgtaaaacagattttactgcgtcttcaatttctttatatcctgtacatctgcatatattggaagccaaccactcctttataatatcgtcactgcctgaaggatggcgtttggaaagcaaatgagcattcataataaaacccgatgtacaataaccgcactgaaaagcaaagtgttcaataaaagctttttgcataggtgaactcttcagtccttctatagtcattatttctttctcttctgcttctgccgctaacatgaggcaggatttcattggccgctgatttatccctactgtacaagctccgcagtctccatttaaacagcctggttttgctccggtaaggcccagcttttctcttaatacgtaaagcagcgtatctgctgttcggatatcaaccattttttcttccccattaacctttagcttaactgttattctatacccttcatctcttagcacattatgttcctcccagctctttgaaaatatcaatcaataaatttttaatcacaaatttgcgatatcgatccgatccttctccatcatttaaaattggagccggtatatactcaagagcagtttgaagtcgatcttctaatggaatgtctttctggtttagcacttcttctacttcagctgatcgaaaaggaaacgaacatactccgctgaaagctactcgaatgttttcttctgtttttaaagctgctactgtaactagtggatatcctgtatcccactgctggcgctcctttatactcatatacgggaggtcagcatactttgtttcaacaaacacctgaacaagcagctctcctttttttagctgcaaacgccgctgaaaaagatcgtgaatcgaatggagctttattccactgagatctgccactgcgagttgactatccgctaaaaggagcggcaatacggcttctcgataaaagatatgcccacaaatatttcctcccagcgttattttatttcgagccgtgtgatcagccacttcgctagcagacttacttaataaaggaaataagtttttctcttccagttcagtcaacgttacacctgcaccaaaaatcatccagtctttatcgacttctgctttttgaaactcgggtatattttttatatcaatgacagcatgggtaacaaacaaacccaacctgcccaatgtcagaatttcagtgcctccagcataataacgcggctgtttgccttgattctctaactcttgaaataaggcaactgcttctgaaacggtagcaggtttgtgatattcaaagtcaaatgaaatcatcagcattcccttctttcattctccaaattaattctggaataagcggaaggtggtttaattctgtttctgctgccaccgttaagctgtttcctaaagaagccggcataccaagcagcccgtgttctccgactcctctagctccgtaggccgcatctaattgaggcgtatgaacaaattctactacgtactccggatgctctccgtagcgaagaggacgatatttccgaagctgagggtttaaaatacgaccatttgaatcaaaccaaaatgtttctcttccggcaaacgataggcccatactcatcgcacccatgacttgccctcttgccattttctcgtttaacacggttcctatgtcaataacagagactgcttttacaatacgatatctatacgttctagggttatattccacttcaactccttcagctgctaccgtccattcaggaccgggacgcccagctcccgtttctttatccaagtaggtcatccctcttaaaatataattgcccctccctatgatttgccctccaattgcatttccgttcggatatttataaccatatacaatttctttaaaggccaaggaggtttcaggctcatcccgtaaaaaaactttttcattttttatttcgatatcttcctcagaagctcgaaatatacaagaagctatcttttttaattggttaatcacatcttcagccgcttctaaaaccgctcttcctgccataaaagtgcctctgctagccaccgttttccaatgttcaggagtcgtttgagtatctacttccattcgcacatgaatacgttccacgggcatctgcaatttttcagccagtatttgcgcgagcactgttttggtccccgtgcctaattcaataacgccagacattaaattcacgcttccatcaggattgaatgtgagaataacacctgaacctgcgtttgtttcaatagtggaggttttccagacgcagctaatccctttggcagtaataaggccgttttcatgaactattctctgcccttcctcccatttcattagctgcttcaagcgacgaatacattccggtaagttaccaacgctgctagaagttaaacgtacttgcgtaggcgtagtatcgcccggcagaatagcgtttttttctctaaactccaaaggatctatacctgcttttttagcaaggatgtccatcgtgcgctcaaacgcaaataatagttccgaatggctaaatcctcgaaatggagaagcgtaagggtgatttgtatatacacataatgaatcacaaaaaacatgttcaagacgataaggtcccgtacagtcagctgctgctgctttactcaagtccgttcctttatctgcgtaagcaccgctgtcgaacaaataaagaatgtcagcagcctgcaagagtccctctttagaacaacctagcttgattttggcatctagacctacgtgagcaggcgaagtaagcatatcttcttctcttgtgttcaatattttaaccagccttccacccacagcttttgaagctagataagcaagcagctccagctgaacagctgcttttcctccataccctcctcctactagcggtgtttcaacgatcacttttcccgcttcaatttcaaagtactcactgattaattttttcaccataaaaggagcttgagaagaagtgataattttaactaatccatttggaaggatttcagcagcggcgcttcttgtttccattgccgcgtgatctgaaggagatagagaaaatgtttcttcaactattaactcacttttttgccaaccttcttctatattgccttttcgaattttaactctgtttgctacgttggtgccgggctctggatacaccgtttcatcatgcttgtagatgtgcatatgttcatgcactaaaggagaatcaggcttaatagcggcgctaggagaatgtacgacaggcaacggttcatattgaatatgaacagaactcgccgcacgctcagcgagcgcaggagtttctgctactactaggactacggcttctccgtgataccgcactttttcaaatgcaagcggtcgccggtcacgaactccttccccggttaacggcaaatgctcacccgtcacaaccgcgtgaacaccgggaatagcaatcgccgcttggacgtctattgcttgaatccttgcatgagcgtaagggctgactactattttggcatgcagggagcctttaaacatgtaatcatttgtatatcgagccgtacccgttactttttccaatgcatcttttcgaataacgctttttccaatgacctccactcttttcacctccatcaatcaaaacagtcgacttttctctttgtatatctttttaatgcgctcatacgcttgttttgtatcaacatccataaaaaggcaagcgtcggtccattcatacaatattccattttcaggtccgctttgtcttatgatttttcttgccccttgatctccttgcagcttatccaagcttgaaaacatttgttttgaaaataaaaccggtgctctggcaattccttgataaaaagatgaaataaacggaacggaagagtgattctcaaacaaagaaacaaatgtatctatcagcacgatacttataagaggctgatccgccaacagcacaataatagcatcagcgtttagttcttttgctttttttaatccgcattttaaagacgcagactgaccttttaaagcgctactacaagaagtatgactccacttcttctgatatgcttctgaaaaaagagtagggtcaacccactcaagttgatctcctttctttgttactactatcgtatgatttacttttgaagaaaccacttttcgtaaagccttacttcccaaacacccattacctaaaggcagcagcaacttatttctgcccatccttttactagctcccgcggcaagataaacagcaacaatatttaatccggacatttttgcccctttttttcatcatacattcggaggttttgaattaattcagcaagaatactaacggcaatttcctgcggtcctaccgctcctatagaaagtcctaccggcgaatgaatgcgtgatgaaatatcagtattcaataatcgaagtgttcgctttttagatcctaaaactcctatatacttcacagggtttgattttaatagcgagagaatttcttgatcgcgataaaaattatgcgtcatgatcacaacaaaatcatcgctttgtatggacagctgtctgtctacttcctctggaaatccaatatgtatttcctctgctagcggaaaatgttccttattacataaagccggtctccagtcgcataaggtaacagaaaaccccgtattggcagcaagtgatactaaatattttgcatcggcgcctgctccccagataattagacgaggctttggtttatgtagatgagcatatgtgagcaaggagcaatttgaaagttgaataccgctctttctcccattccaatcatctgttgcaaaaaatgatgcgtcgctatttccaccaaatatttcgcccgtcttttctacataaaaagaggttgtttgaataaagtttttttctaattttttaatatgcaaaacaggatttcggttatctaaatgacgtttcacccgcaaaagattttgcttcatcctcacagttacaggttctaggagaatatagagaattccattgcagcctgctccttgtccccatcctacatcaccttcttcttttaaattgtacgtaacggttaatacgtgctcagtgtcgaacaactcttttacgcgctcagcaatatctgcttctacacaaccagcgcttaacatcccaatgttctccccattttcttggaacagcatggacgctccttcttttaaatatgaggatccttctacatgaacaatcgttgccaacacactttttactgttgatgtgtttacagcatgtaaaatatcgtgcatttttattattccctccttttcctgtcgaggttttaaaatcttttcacgttttacacagaactacaatacgctacagtagaccacttctgctctctgaatgaatccatgtattattcatattttcaaagaagctacaataagcttttaaagacttagaagaactgtcgtttgaaaggagaataatatgctattcgactcaacaaaaatcaacctaggaaaattgaacgttcgcagtgctgatcaagcaagcagtatttctattggaaatacgtcaaaagttacaagatatgtcacatcaaagaaaaatcaggccttcggacagcagcacgctgatcaatgttttacaacgggatctgcttacaaaattgtagataatgattatgtagatgcatttgcaacaaaaaatgataaataaggaggaaactatatgattttttcgcctatggtcattaacttacaagccttcaaagtgaacgttttggataattcatctgttttaagcataggacctaatcagcagcttgatgtgttcgtatcttataaacgtaatcaaggtctgggagaatcaaacggagatttttctccgaacgtaactccgttctcatggattatagactcagatgtaaatgattcaaattcagttaaaaatagcgtaatttaattttttcatctcctctacctctactgcgcacaactagcagcatatcttcatctattcatctattagcattcaatcggaagcctaataaatataacctgcatctgaactggctatatttattaggctttttctatgaaatgggcactttttgaaaagatgatgggctgtcaatttgatctcgatcatcgacacagcttctcgttcctataaagccgctatcatcaccaaaattttgcccaaatccctgtgtttttttatctgaattattccagtctgctagtaaattctgtccgatatttactgcagacgcattttcaaaggaatttatctttagcattaaaatattaatatttatagatgcacctgccatttaaaccacccccttttcaaactatattcaaattccatctttttatgatgtgtggtaaggaggaaaccatatggactttgataaacttatgcagtggatggaatttgctaaaaaatatcaaacaaatgacttttggaacggtgtttttgatcaaactgcttttaacgaatttatgaaagaaaatatggatatgaatgctcctgattcatatcaggcacctcaggcttctaaaagtacttttccacctgttgacatttacgttaccccacatgaaatcattattatcgctgacttgcccggctatctaaaagaaaatttgcacgtgtctgtttcaggcagccggcttttgttaaaaggctcaacgcaccctctcatcacaggacagccggttgtacaagaacgaccttctggagactttaaccgaattattgaattgccagagcctacggatgcgcatcatctgcgtgcgaaatttgaaaatggactgcttattctttcttatcacaggcagtttttccaagaagaacgtattcacattgaataaggcttagtagttttatgaatgaaattcaataattcacataagcatttataaacgcaaagaatttaacgtgaatttccaaactggacccatttatatttatctaattgttattacatcggaaataagcccaagatgaggagaagcgaaatgtctatgaaaggatttttcaaccccaaacagactaaccaacagcttcatactgagctagcggacttcaaacatcaaatcaagcgtattaacacgcttgaagttcacatgaaccgttttctaaaactcgaaccgcaaattggttctctcataatgctcaaaaaaaagctggaggctcagccctcgcactccaatgattcttcaccttcacaaagaagcactcataaaaatgctgaacacgcatatgcaaaagataagaaagagattgctaaccagcttcaatttttaaaggaaaaagtagcgcaattggaacaagtgatctccatgcaaccccctcgcgataaaaagatagacgctgtaccttatatggatataactcggttagtagaacaatctgtagaaaaacaaatggctccttatatcgaaaaaatgaccgaactagataacagagtttcagcattagaacgcagcatgtcgcttttaactgaagtacaggtggacatgctaaaacggacttcttcccttcaagaagaagtaaaattgattcaccaaaaaggcacacttttagaaaatgctcccccgcctattcatattgataaattttttcttgataaatacgaacaaaacaacaatattggccaagttggcattaaagaactcggcggtactttaaatatcggagctacatatggaagcggagctataccaaaggatttcacggaccaaatccaaaaagacatggaagagttaaaaaacgctaaatcagatatttcttctggtaaaacgaagcctgcaccagaggaaaaagagaattcttcttcctctttcgaaaaagaagacacgtatacggaagttcctatttttgatgaagatgatccaaaggaagagtcagtctaaaaaagtcataaaattatatgtagttatgactagaatttttgcaagctattctttacactataggtaataacttcaaaaaaggagatatgctgatgccaaagcttttatggagaataggtgctgtcatgttgctaatgtgtggaggctttatctttttatttattgctgcttcgcaaatgatggttcagcaatacaaacctttttttagacgcgagagtgcataactctcgcgtttttttattgaatattatcctgtttatggtaatgtatatatcaaaaagatataggagaggaaaataaatgaaggagaatcaaacaacatatgcaattttaggacttcttaccacggaatgcagaactggttatgaaattaagcagttaatagatcgaagtttaaatcatttttggaaaatcagttatggccaaatttatcccactttacaaaagcttgtgaataatgaactagcaacggtcaattccgttgctcaaactgataaaccagataaaaaagagtatgtaataacaactaaaggaaaagaagttctgcaagattggctgcgtgaacctattaagcagctcccttccgaaagaaatgaaattttgttaaaactcttttttagtagtcagcaagaaaagcaactcacaatttcccagttaaaaaacgctcagcagaaactaactgaacgttatcacatgtattgcggaatcgaagacagcatttctaacagcccttctcccgacagaacgtattggcttattaccctagactacggtaaacgaacaacgtgtgcttcgatagaatggtgcaaagatacgattaataaattatatgatgaggaggcgcataatttatgattcattccaatcgtgtgatggctaagcccggtcaggagttggttgtctttgttataggaatgcgcattaataaatggacagccgtacacaaatggttccctgtatttaaagcaatgcctcctatgattcgcgaattgtatacaaacaaaaaacttggctttttatctttgcaaggatcttttaatttaagaaccatcacgctgattcaatattgggagtcagttgatcaattgacctcctatgccaaaggtcctcaacacttaaaagcttggaattctttttataaacaggcttcaaaaacgaatgcagtgggcatttatcatgaaacgtacgtcattcctgcaggaaattatgaatcagtatacgtgaatatgcctttgttcggtttagctaaagcgcttggatctgaaaccataacgaaacatactcaaactgccaaaaaacgtttgaatgttaaaaagccgctttaactaaaagcggctttcgttatatttgttatacatatattttcagcatttgattggcacctttttgaaattcatacgggacgtctgctatttctgttccctttactagaggcgcaatctcttctaacagctgcggcaaataggtagaaatcttgccgctcaaattcgttaaaggaaataaacgtacttcctcttttgtaacgcgtatcagttcttttaaagcctctaaatgaaacgtataatctaaacggtcactgtacataaataaaaagtttgcacaaagcgttaaatcaaactcgttcttttgaaacggcaaattaggaagtgctccgtactgataggcttcaggattctttttcatatgagcaatacaatcttttaatgctctttttcgatgttcagttaaatcatcaatagacgaaaaatacttccacacatactgttcctgtacgtgctgcatttgattcatcgtatgaattaaatccaggcttcctttcttttcaagctcttctgccgtaaatttataggcaatatcacagctagtagcctccgtaccttgctgcaaggcatgagcagtaaaagaacaggccccgctagcacagtctaacactttttttccttttaaatgcttttcattcaaattaaacatagctctatactcttcaaacgttctgccgataaaaacaactcggtcaattcctaactttttctctgctaaactcaactctactcagctcctatcttttacttagactttcattttacagaaaattgggttaaattccaatagtttatgtagtaattagtttaaccactatcttttgaaggcctaaaaacaggctccaacacataactcctattgataaactcataaacaaatgaagagagttttttaagcaaatatagacgacagcaagtagtaaaatagtgcctggcagtccataaagaacgccgagtgtaaactgactgaccacttcctttttttctccttgcactgataaccatataatacttagtaagctcacaattggaagggcagccacaattccaccgtatgtcggaaatcttttggccatttctgttacccctgcaataataagagcagacattaaaattttgatgatactatacatgttttgcacgctcgctcaataactgaaaagcctgttgaatcagctgtttttcagatgctgtcatttcgcgtaaaatagctgatactttttcttcatccaagcttgaattccgttttaacaggtcttttcctgcttctgttaaatgcagaattacttttctttcatcatgtatatctctatttttatatacataccccttatcaatacttctctttacgtgttcagatgccgtattatgtgaaacgtgtaaataatccgcaatttcttttattccaaccgaagatgatttatctatatgctgtaaaagacgtattgtttggtgtgtaattttctcttgatgcgtatagtgcaaatgataataaatagacgtccaataactgtttaactcttctactttcatgatcctgctcctttatatcgtatttttagttattatcgtattatacgatatatatatattacaggaacaacagccaggtttcaatactaccttctttttatctgacatctcacataataatacgatttaacagttacactaatcgtacacactgtgaaaggcggttgtatgacattgattcttcgactgttaaaatgggttccgaatctctttacgattggaaatttgctaagcggcgtattttccatagcttttaatatgaatagctacgaacgcttagctgctctttttatttttctagccgcttttttcgatttatttgacggcaaaattgcgagaaagctgaaagttaacagtgcgtttggtgtagagctagattctttggctgatattataagctttggcgtagcgcctgcaatgctatttcatactctttctccccactcttggctaaccgtactcggttttatgatttatccaagcatgggcgcattaagattagctaaatttagtgcaaatccaaccataggttattttatagggcttcctattccttttcccgctctaattatcgcactgcttggcatgttttattacgtaaacccttaccttatgattattttagctattttgatggttagccctattcgagtgatgaaaatttagatgcaataaaagacagacaaaatgcctgtcttttatagtgctgtccattcttcgaacagcattttatgcttgaatttcagctcatgttctcttttttcaagctgagcttgtaaagagagccactcgctattatcaggtgctgagcataatttttcttcaagggacagtaaggaatccagtacgtcttcaagctgagcagccacttctctttgctgttttatgttcatttttttcaacagtagtttttcatttttcttcatttttttcacctctttcttttctttacccaatgttgagtgttttagtatagaaagtatatggttaaaaatatttctactgtaataaagattctttaatagcttattttatttttaatggtcatttagaagatagtttaataagattattgcatctgatacaattagtaatacttttacaaaccgtgatatacttaaaaaaagaaaggatgatgaatagaaaattatgctgcaaaaatttggtttttctcagtatgaaagtcaagtatatgaagcgctgcttgcgaatgatggtccgctggatgctagttcgattgttacgtattcgcatgttccaaaagcaaaaatttatgaagtgcttaatcgtttaattgataaaggtattgtagtaaatacattgtccgggaaaaagaaactttactcagcggtagcccttcaaaccgtcattcaaaaacttactgctgattttgaaaatgacattaatgaattaaaaacatataaaattaaaaaaacgtttacagatgaccatgtttggagtttaaaagataaatcctctatttctgcccatattgaacaattgattcatgaagcggaatcttctattattttatccgcctggaatgatgagttagaacattaccgctcattgctagaagaaaaagagaaacaaggcgtaaacgtcgaggtcttaaccataggaaacttgcagactgccctcaaacatttacatacattaaatccaatagatgatcataaaaaccttgagccgtcgcagttgattattgttgacgatgcttaccttttatttgccggcattgaacatgagacatggaaagcaataaaaaccatgtcgcagccgcttgtaaaagtttttgctgatttcttttatcatgacgttgcacttacccatattacaaagaaatatcaagagcagcttcttcaagattctgagatcatggagctgcttactcgactgcgatattaaaaaggttactaattcattagtaacctttttaatattacctattgaaatcctttctaaaaaaggttactattctagttgtaactttttaaagagggggttttttgatgaataaaaaagtttacatacttgcgattgcttcctttgttgttggaacggtcgaattaattctaggaggcatcttagacttaattgccgatgcatttcatgtatcattagcaaaagcaggttatttaatctctatttattcgtttgtttatgccttgtctgcgccgattttactaaatgtgacggctaagatagagcgtaaaaaagtttatatgtggacattatttattttcttattgagcaatgtattttcagcctacagttcaggctattatatgctactgattggacgtatccttgctgctgcgagcggttcttttatcattgtactatctaccacaatggcttctagaatggtaaaacctaaataccaaggcagagcaattggcatcgtatttatgggaatcagcggctcacttgttttaggcattcctcttggtattctgattggaaatgcgcttggctggcgtcaagtatttgttatgattgcaattttgactgccattattatgattaccgtttggtttacaatggagcgtctagctcctgctccaattgtaccgttaaaaactcaggtaaaagctttacgcaataaaaaaatgctcgctattcacctagcaacattatttgtacttgcgggccatttaacgctttatgcgtacttcacaccatttttacaagaaacactaggattaaatacaatgatggtgaccattatttatggtattttcggtcttgctgccgtggcaggaggaggacttggaggagctgtttctgataaatggaacccttcttcatctgttatcaccatgattgctctcttttttgttagcatgattgctatgccttttggcgttcatttgccattcgttgtgttcttgcttcttatgatcatttggagtgcgctcagctgggcggtctcaccggctcaaagcaatttaattattcatagtgcacgcgacacgtcggacattttaatcagcaccaatgcagcgatttcacacgtaggaattgcgatcggctcctatgttggaggaattgtcgttaatcaatactctgttatttataacggctgggttggatctatttttgttttgcttggtcttttctgctctctttatgcggtaacgcgaacagaaagcacagcagatacgcttcacagtaaataagcttttataaaaaagcgtacacacatggtgtacgctttttttgattatgatgggtctccatgcatttcagctgcaaattgagattcggacatgacgataaaaccatgctttcttagcaacgcagtcgttaccccttcaccggctaatttaacatttgaaaatgctccgttatatatatgttcacttccacatgaagggctgttttcttttagtacaataacagtagcttttatttcttttgcgatgcttagtgccttataggccccgtctatgtatatatctgtcacgtcttttcccgatcgttcaataactcgcgcatttccatttattacgtctattcccgttccttttataatttctgccggttctctaggcgtgtgaaatccacctaacagttctggacacatcatcaccgcctctttattttcaacgagcgcttcaatttccttagctaaggcactgcttccattatatctgcaagcttgacctgctaagcaggaactaaccaaaatcacagaattctccctcccataaaaaaacacttctcattcatcatacaaagaatatatgatgaatggaagtgtttaccttttatattttattcaagatcacgctttgactcctgctctttgtctcgatccgttttcgcttcaaattcagagcgagtcattacgtcctctacatgcatatttacttctactacttctaagcccgtcatctcgtgaactgatttttttacgttattaacgatttcagagaaaatagctggaacatttttttcgtattcgacaattacttttaaatcaagggcaacttgcttttctcctacttcagcgttaatcccttttgtgatatcttcagtgccgcggaagcgatctgttaacccgctcataaatccgccgctcattgataaaattcctttaatttcattagctgcaattccagcaatttttttaatgacttgatcttcaaatgttaacgtattttgatgtgtattttcctgtgattttactggtgtatttgtttcattaactgccataactaacatctcccttaaagtgattttctatcttcctttagtaaagaatcctacccaagcatttatgtctaaatgaccgtctcgccacttcccgattacataaccaattcccataaaagctacaattagcagcgtgggaccaaaaccaattgttaataacaaaattgccaacactaaacctgccagaataccaagtactcggccacggtacggaatcaatttatcaggagtactcattatgtccctccttcatcacacaacacgctctttctttcgtgtttgtgtatctgttaagtcaatacggaccgagtgaacgggaagctcgagtaaggcctccacggcgcgttttgtttcaagctgcatttcttttcctagtgttggtagtcgatctcgtccaaacaacgaacagttgatatacagactaactttttctttgcgagaatgaatagatgcctggacttcaggagagcgtattccctgaaagcttctaattgctcgtaaagctgtagattcgattgttgctttagaaattgttattttgccttcaccagttacaattgctaaattctttttaggcggtctgctaaatatgcctgttaaaagaaaaataataaaaataactgctaaaaatgcgcttattgataaaattgtgtagtaaaaccactcctgatgccgccacttttctaaccagtttgaaaggtgaggaaccctataaaccatcagtgctaacataccggaacaaatcagtcctgcaattccaataattgcgattaaaaacagattaaaattattcaattttccacctcatctcaacgtgaactcctactgcttttttgttgtgtgtaaagggaaggcaacgagatattcaatagttagccgcaatatttttttgataaactttctaactgtaaaactgaatataaaaaaaacgaccaggtttccctagtcatttttcgcgtctctatacgttgtcttgtgagctttgatgaacttattaccgtttattaaaccgccaattaataaaatagcggccgttaaataaaaccagaccattaaaataataatacttccaagctgaccatagatttgcgagtagcttccaaactggacatagtatccaaatccggtagatacaacttgccatcctagcgtggagaaaacagctcctggaagtacatctttccacgttactcttgcgcttggcatcagtttgtaaaaaagaataaaaaagcctaataaaaataatgtcccaattccccatctaattgtcgtccagctttgaaaccatatgtcaggaacttggacttttgttaggaccagatgtcgaatgacctcttcaataattggtacaaataatgaaatagctaccacaaccataaaaccaaaagttaaaattaaatcattgattaaaccgcgcaaaaacgtttgttttctttgaatatgatacgcgtcatttaacgagcgaaccaaagattgtatagccatagatgcgagccaaaaagtcgccaataaactaaaagataaaacttttttaccgctattgttaactgtttcaattgaccgttcaattacgtcataggcgcttttaggagtaaatggttcaatgaatatcagcaaattgtttgtatcaattggaaagaaactcagcagagaaaaaagaaagataataaacggtacaaaagataacaaaaaatagtaggctgtttgagcagcctgatcaaagaaacgctccgtaaaaaaacgagcggcaacggtcttagatgtttgaatcataacagcgttctcctttactttcgcttcactttgtagtgaaattcatattcaatttttatgtttaacatatattggataagtttcggcttataaagctttccttttccattatccgcggttaataaagaatttaacctgtaaaattatacagccggttcataaagaagataattattataattacatctgccattaccaccatatcaatagatcttctttttctttcataaaaccataaattctttgaggctgatctcccttttttcttacttcttaaacttttttacgctatgttaaaaaagtaaaacataagagcgccgatcagcatcatcatcatcattgaaacaaaaataaccaaagcgtgagaagattgatacgtttggctgttaatttttttgcgggttgaaaaataatgataggttgagaagagaagcaaacctgcacttgcagctaaagaaaagataataacagcaataataagagtatcggctgcttcacttaatttttttccggaattgaaatgtaagccgcctgcaacaaagccaatgccgagtgtggcaatagacgttcgaatccacgctaaatacgttcgttcatttgctaaatgctgctgaatataaatggattcattttcttttttagtcatttacataccaccgtccttttatatgtcttctattataaataaatgctcaaacgaaaataaattgaggacgcttcacgccacattatacccgaaaataacgaatcattaccatcttcaagcggtcaaaagagcttcttcataaatcaaaaaagccaacgggataacctcagctggcttttttgatttatgaaacattttccttatcttgatcatgctgatattcctcgtcccaataatcagcgttttgaattcctaattttcttggagaaaagatagggtctatccctagttttctctgctggcgataatcttttaaagttattaaagcaggtttagctaaaatcaaaattgcaattaaattgagccaaaccattattccaactccgatgtctgctaatgcccatgcagtttcagccgttcggatagatccgtataaagtagtggctaaaagagctgccttaaggaacatggatactattttattttgtttgccttttattacgtaagctaagttcgtttccgcaatataatactgtgacataatcgtagtaaaggcgaaaaacaagagagaaacagctacaaaccctgatccgaatccaggaagcaccgtctcaactgcttgctgcgtatattgaggcccggcttcaactccttttaaatgatccacattgaacgaaccatctggcgcttgggtgctgtaagaacctgtaattaaaatcataaaggctgtagcagagcatacaagcagcgtatcaatataaactgaaaaagcttgcactaaaccttgcttggcaggatgtgagacttccgctgctcctgcggggtgagctccggtaccttgaccctcttcatttgaatatacacctcgcttgactccccacgctatagccatgccaataattccgccgaacgtagaatcaagtgcaaatgcacttttaaagattaaagcaagcactcctggtaaagcttgaatgttcaatccgataatcactaacgaaacaaggacatatcccatggccataaacggaacaacatattgtgccacggcagcaatacgcttaacgcctccaaaaataattaatcctaaaataacaacaagtacaattccagaggttaaaggcggaattgaaaatgcattatttacccctgctgtaattgaatttgcttgcactcctggtccaagtacactcatagctagcagtgcggcaaaagcgaaaatcagtgcgtaccacttcttccccatgcctttttcaatataataagcaggcccacctcggtattctcctttatcttttactttataaatttgagcaagtgttgattcaataaatgcactagctgaacctataaaagcaataaactacatctaaaaaactgctcttggaccaccgaatgcaattgctgttgcaactcccgcaatatttccaactcctacgcgccctgataaagcaagtgttaacgattggaaagacgaaacgcccgattcagaactttttccattaaacaataaagtaaccatatctttcaaatatcgaacttgtacaaatctagtgagaatagtaaataaaagttccactcctatacataggtaaagcatcggcgtactccaaatcatttcacttattgtactaatcatctgctccaatatgaattcccccttaaaacactttgcacattatgaataatgagaacatagttttaatatagagttaaaaaacagaaaatccactctttttttaaggttgttttacacattatttgataaatagacaacatttgcggatataacgtatattttggacagattatctgacgcatttttcagtgatgcgtaagttctttacataatccccactgtcacagcataaggtaataagtgaaccaagggtcactttacgttctaagccgagcttacacacagcacatctttctgttttcatttcacgttaatagttcactaagtgaatcattttatttttaaatatttctgatatatggtataatttaaactgacaaaaagatgctgcatgtatgctaaaagagcaggccgtatggtttcgctcttttgttgttttcacgccatgcggcacaacgaaagaaggaaatagaatggaattatggaaacgaaacttgtacatttgctggttcggttctttttgcaccacagccgggatgagtttagttattccgtttttaccgctttatattgaaaagctgggagttcacgatacaagctccatcagcagatgggctggtattgcctttggatctacctttttaatggcggctattgtttctcctttatgggggagtttggccgataaatatgggcgaaagcttatgctccttcgcgcaagcttgggtatggcagttgttatgacttccattggttttgtgcaaaatgtctatcagcttgtcggactgcgctttttaatgggtgccgtttccggcttcatctctgcagccattacattagtagcgactcaaacacctaaagagcacagcggtaaagcattaggtacgttgtctacaggggctgtatcaggatctttattaggaccgctagtaggcggctacttaggagatacaatcgggctacgccacgtctttttcgtgacgggtgcatttatgtttttgtcttttttaattgtaaatttaattcaagaagacaaaaaagagacggcgaaaacgacgaaagaatctaacattgggttactgtctcttaaaaattcaaaggccgtgattggtgtatttgttacaacttttttactgcagcttgcggttatggctattcagccaatcgttacactgtatgtaaaacaactgtctgctcataccgatcaccttgcccttatttcaggttttgtcgtagcggcaacaggaatttcaaatattttagctgcatcaaaacttggcaaagtcagcgatcgcgtgggtcctcaaaatgtgcttcaaatatgcctgctcatcgtagcggttatttgcggcttacaggcctttgtgcatagtacttggcagctattcttacttcgttttttactcggttttgcaatgggaggattattaccttctattaattcttatttaaagaaaattgtaccggactctattacaggtaaaatgtttggctataatcaaacagcgcaatattttgggaatttagccggtccagtcattggcggacaaattgccggagctaaaggaattccttacgtattcttaacaactagtgttcttctactattgaatgctgggtgggtgtattatcaacgccatcacggacaacagctagacggtaaagccgcataaaaaaaccttccgttttaacggaaggtttttttattaccacaagggttcttcttcgctgcttacttcataagaaagtggcatcataacaaccgctgctatgaagaaaataagctccgcgacaacaatggatggaaaggaaaagtcaaatagtgagagaataagccaaataataaggggtgcaaatgagtagattgataatcgcttttgggattttgcagagatatactgttgtttgtcacagtgtgggcattctaaaacgtttctaaatgttaacagttgtttaaaggttgtcctccagttccatttatgattacaattttgacaggtggccatgggcatcacgctcctaaaaagaatttatgtacatataaagtatacgtacaagttgacaaagagtttcatttttatgattaaaaacgtttttactattataacataaaacaaaataaaaggctttttacaagaaaaagccttttatttcaacttttatttagatacagcttcattcgtttgagaagctgtttttacttttataaccataataacaaaagctagcaatccaagaatcgctgctacgagaaaaggagcttgaggcgctacggcattgccgataactcctgataataaaggagcaaacgctgcgcctaaccatcttaagaaattatatcctccagatgtaattcctcgttcataaggagatacttccattacatgactcgtaaataatgcattattaagtcctgatacaagacctgctgccatgattaaaacaatgcgcaaccatgttgcatcaaaggcaaataaacaaattaaaataagtgaaaaaacaattaagctaacatgcaacacttgttttggctgatatcttttttctaactgatgtgctaaaaccgctgagccataagctaaacataacccccatccaaagaaaacaaagccaatttgaagagctccgatcgatagaataagcggcgtataagctaacactgtaaaaaatccgtagtaataaagcatgcctgatacagcgccttgagtaaatgtttttaatttataaagtttaatcatgtctttaaaacccgctgctttacgaggcttagtgcttgcaggctgtttaacaatcgttaatactaaaataaaggcgataaaaattaaagcacttgtaccgaaaaaaggcaatctccaagaagcatttcctaacacgcctcctacaagcggtcctccggccattcccaaaccgatcgcagcttcatataaccctactgcttttttcacttcacctgataatgcaataagcagcgtcatagctgttgcaaagaaaaacgaattaccaagtccccatcctgctcggaaaatggaaagctgaggaatattgttagaaaacccgcatagtgctgcaaaaatcgtcacaatgataagtcctgttaccatcaaacgcttgtctcctacacgtgatgctaagatacctgctggaatcatcataatagccatcattaacaaataggaagtaaataacatttctacttgccaatgagaagctccaatttgcttagcaatctccggtaaaatcggatctactaccccgattcccataaatgctaaaaaagtagctactaccgtaataatttgacctaatcggttatttgaatgctgtccttccactctttcatctctccttttgtttttgttttttcatgtatttccatagcagattctcgcatttcttttaattctgttttaaatgcctgcattttaaccactttaaattcaatcatcttgatttgattttccagtaaattttctattttaattatctctttcgctgataatccttgctgctcacttctttcttcaatcattcttttgagcgacataaaccgctgcagctcctgtaaagaaaaaccgagaacttcttttgcttctgctactttccttagttcttttacctcttcttcggaataaatccgtgcatttccttttgtgcgctgcgggggcaaaatgagtccaatctcttcataataccgaagagcacgcttggtcaaaccggtcattttcgtcacgtcatcgattaaatacatgctttccccttcacccccttcaacattaacgttaacgtcaactctatattactattatagattaacgttaacgttaatgtcaataacagtaagacattttatgtaaatttaaaaaatatgtgcacaaaaaacctattgataaatcaataggttacatcaatatgtcatatagctgctgtgctgtttctcctgttactttaccgtatacccctcttcttttagaagtaagttccgcactctcggcggtgaatcgtacattgtatacgactccttcataagtaagctgtacatctggatcaagagcgatgctgtaatcagcttttttccattgaatttgtttcataattgattctacagctaaagcatcttctgaacttaacattttatctcctgcttttataggcttgccctccctttttttattaaattttagttcagaatgagaaaatgaaaattcaagttggtttttatcatgcgctatgaaatcttggggtagttctacatagcggacaacttctccttcgtatacaaacacaagcatttgattagcagcagatatttttttcatcatctcttcactgatcggtgcgtttacaagtttttctacgtcggctttcttgcttttgtttgttaacaaatatcctttttcccatttaaaatcacttaacttcgatacatccactgagcttacaccttttttttcaaatgattgctgaatattctcccccatttctttgtcgttggtgacttgggcattagaactgcaccctactaaacaacaaaaaataaggcctattgctataagagccttcacttttgccttcctcctctctctcattcttttagacaattccaactttgtaccattttaacatataattcctatttttcgtgaaaacaaagaaagaatacgcttacataattttacgcatataaatttgatttatttataagttttttctgaatattttaagaaaattttaatattttatttagttcgtttttaaactttatctttagactaaaaaataagttaaaaataaataacgcaggaggaaaacaatgacttgtctatctgaagttttaaagtttaatgaaaaatttgtaacaaataatcaatttgaggcttttcaaacatccaaatttcctaacaaaaaaatagtcatcttaacttgtatggatacacgtttgttagaattacttcctaaagccatggggctaaaaaatggagatgcaaaaatagtgaaaaatgccggagctgttatctcccatccctttggcagcgtcatgagaagtatattagttgccgtctacgctttgcaagctgatgaagtatgtgtcatcggtcatcatgaatgtggaatgacgggcatgaaagctgaagctattttagcctctgctgaacaaagagggattagcacggaacagattcgcaatctaaaatatgccggcattgatttagaatcatggctgactgggtttgaatgtgtagaagatagtgtcgaaaacagtgtggatatgattcgaaatcaccctttattaccaaaagacgttcttgtttctggaatggtcattcatccttcaacaggaaaacttgacgtcgttgtcaacggctattcccaagaccgagctgaaaccgtaagctcatgaaggaggattttatcgaatgctaaaagataaccgatttcaaggctattcagcagggcatttacaaaaagacattatcgccggtttggttgttggggtcgttgctattcctttagcaatggcctttgctatcgcttctggtgtaagacctgaatacgggatttataccaccattatcgcagggattatggtttcaatattaggcggatcgaaatttcaaattgcaggtccaacgggtgcatttgttccggtgctgcttggagttgtcatgcagtatggttatgagaacctcattattgccggctttatggctggaattatgattacgcttctcggagtatttaagctagggaaatttataaagtttattccgcgccctgtgacgattggatttacagcaggaattgcgattattattttctcaggtcagatcgctaactttttaggattaaaaggaattgcaaagcatgaagaatttcatttaaatatgattgaaatcctacgaaaaattgcaacgattaacatttacagcgtcatcatagccgctatttgtttagctatcgtgattacaacgccaaagtttttacctaaaattccgggtgcccttctaggtcttcttgtctccacacttgtagccattacactgttcccaggaaaagtggcaacgattggctctacttacggtgccattccgagtaaactaccatcttttagcttcccagatttaacatgggataacatcgtgatgctatttccggctgcctgcgtaattgcaatgcttggcggtattgaatctttactatcagctgttgttgctgataatatggccaaaaccaagcataatagcaataaagagcttgtgggccaaggaattgctaatattgctacctctctatttggcggaattccagcaactggtgccattgccagaacagctaccaatatcaaaaacggcgcagcttctccgttatcaggagtcatacacggcttagttgttttattggtccttgtgatgctagctccttatgcatcaaacattccgctggcaagtatggcacctattttaatgtttgtggcttggaatatgagtgagcgtaaagaatttgcgcatattttaaaaaccaagtcagctgattcatttgtactggtagctacgtttttattaacagtttcaatcgatttaacaacaggtgtaggcatgggtctacttttagctattgttatgtttgtgaaacgaatgagcggatcactgaagatttcaaaggttttagcggaaacatctgaaaacgctcacaaatctgatttgatggaatataccatgcaaggatctcttttctttggatcagctgaagtattagaagattcctttgataagatcgctgaagcgaaaccgaaagttttattgcttcgaatgagccaagtctcctttattgatacatctggagaagctttactatcgaaggtggtcgaacgtttgaaagattcgcatagccaagtcgttatttctggcttacagcaccagccgaaagaaatgttaaagtcaaccggtctatatgataaaatcggtgaaaaaaatatattttcctcagaacctcccgtgagtaagattaaagctcgtcatagaatcgttactacgtaataaaaaagagatccgaacgattaatcgttcggatctcttttttttaaatattaaaccggtaccctgctccccaaaccgtttctaggtactgaggatctgctggattttcttctaacttttctcttagttttcgaatgtgaactgttacggttgaaatatctcctgaagaatcaaatccccaaattttttcaaatagatgttctttacttaatacttgatttggatgagaaacgataaacttcagcaaatcgaattccttcgctgtaaaaaacacttctttgtcattcacaaatactcttctagcgagcgtgtcaatcgctaagccatgaatgcgaatcatacgcttttcctgcttatcagagagtctttcatatctcgctaaatgcgctttgactcttgcgaccagctccccagggctgaatggcttggtaatatagtcatctgcacctagcccgagccctctaattttatcaatttcttcttttttagctgaaactaaaatgattggaatatcttttgcagctcgaatttgcttgcacacttcaaatccgttcactttagggagcataatatccaaaataaccagatcaaaatgttcatttaacgctttttctaatcccttatccccgctatattgaacgtctatttcaaaatcgttaatttctaaataatctctttgcaattcagcaatacttacttcatcttcaattaataatatcttcttcatgtgtatcaccattttcattcattttttgcaaagaaaagaaaatacttgttccttcgccaagcttacttagtgcccagatgtctcccccgtggcgttcaacaatttgttttgcaatggctagtccaagtccacttcctccagtattgctgttgcgggactgttctgctcgataaaaccggtcaaaaatatgcgctaatgcttcaggtgaaattccagagccgttgtcttttacttcaataatgagttcactttcggtagcagaaagaacgatatcgattcttcttttttctttatccataaatttaatgctgttggttgttaaatttattaaaactctccgtagctgctcagcatctgcctttgcatacagtgtcgttagagaatcattagaaaataaaacatcaatatcatgttcactcatttcaaactgaagctcttgcacataactttccataaatgctgaaatattaagttttttaaacacaaatggaatttcgtgcaaatccaatttagaaaataaaaacagctcatcgattaacgcattcatgtcttttgcttttgttgaaatcgttaacaaatatttagaaagcttatctggcgtattagctactccatcttgaattccttctacatatcctacaatggaagtaataggagttcgtaaatcgtgtgaaatacttgaaagcagctgctttcgattatcttcatattgaatttgcagttcaacagaagattttagtttttgcctcatttcttcaaaagcttgcgttaattcgcctatttcatcctttgaattagcagagatctcaaagtgaagatcaccttgttttattttttcagccgcttcttttaattcacgaatgggtttaataatgcttcttgaaacaagatagtttaaaaatccaataatcacaatgactaaaattaatagtagaaagattaaaaaagggaaaattcgattaataatgcctacataagggctgatttttcgcaaaacgtaaatgcttcctttttcttgattcgagaaatgaaaatcaaggttgatatatgtaaagtactgcttgcctatgcgcagcatgtcctgctgatacgaatgatttcctttacttttttgatggtttggcaagtatttacgaaggttttctcctttaatggattctgaagcatatacaacctctttgtttttttgaatcacaatatcaatattttcaaattcatattttttaaccgtctccggccgcagcagctgctccggtttttcttcactcaataactttaaatccaagaatgcattttcttcttctggcgttaacaatttgtactcataggagtgactgtacagttttcttacaaaatcggcgtctccagtaatggagaagaaaatgagaaagcccgataaaaaaagcaaaataataaagacaaacacaatactgatatacgttaaaataaaacgcagctgaattgacattacttaccctatgcccctttggctttaacaaaactatttgatagactagtaaaggtgaataacaaatagatcgttagacattatacatatagcaaaaattaaaacaacaaaacaaatgtatattctcactttaccgtgatagagtgagaatgaacaccaccttttttaccattttatgaattactggaaaattatgatctatttttcataatattcttaggcttaaagttataatatatgccttaatatttaaaaaaaggagactttttaatgaaaattattaaagctacttcctctaacatcccttctgttgcccgtctatacgtagacagctggcgcattacatacaaagggttagtacctgatgcttatttaaaaagcttgtcttatgaacaaagtacagaaaaatggtccctttttcttaccgagccttctcattttattttgctcgctatcgatgaacaaggaaagattgtcggcttttcagcaggtaagcctcatttgtcccgtgctgaaatatacgcgctatacgtttgcaaggaagtgcaaaaccaaggaattggtcatcttctattttctcattcagtaaaagaatttgctgatcagcaatatacgtctatgattatttgggctatgaagaaaaataagaaagcagttcagttttataaaaaattaggcggcaaaaaaatcttgaatcgcacaagtcagtttggagaaactaaagttgaagacgaagcatacggttgggaacgtcttccttctaataaataaacgagcacactagtgtgctcgtttatttattagaagataatattattgagccgtcgtctttttgtccgttgaatgaactttattacaaagctcattccagtgccaaaaacaattcccttgactcactataaaacaatccagccatttctgaaaattcatatgtaatacatgtgcatcttgaaccgatgcgttccgcttttttactattatatatgcagagtgcgctgattttttggagtcaatgataatctcttcttctccaacagacccaattgtcatatagagactctgacttttataagctgtttctcttacatcttctaagctataaagattccctgctatttttttgtcagcatcaatgaacaaattacacccatttgttagctgcaaaaactgcttgtagtcttcaggaagtgatacatgcatttcttcttcaaaaacattcagttgattcttgcttactccatcaaaaaaagtacacgtggttctgtatacttctccttcatttttacacacttctataacattattgttttcccacagccgctttcgaagtgaatttattattttttcaatcatactcttcctccaagcgttggatttaaaacggttacattacattaattaaacaataatgtgctaattccttctttcctactaaattatacgacaaactttagaatttcatgttcaaataacatagaaaaaagcagcgaatatcgctgctttacaggttatacaggtgctttttcttcctgttcaggatggtgatcgtaatcaataagcgcttttggaaggcccgtatatttagcccaataataaatcccaagagatacgaccgctatgataattaagtctacaggcgtatcgatcaaaccctttcctccgccgaacgaaccaatataagaaataaagagcatgatgatataataagcaactaaccaccaagttgatttaatctgctgacgaagacttacttcgtttttaggcacatatttagtaaaaatcaaatatataacaaacataaccaattgagaagttaacaaccatgaaatagtcttccatcctgaccagtagacaataaaggaagcaaaaataaaggataatggaccaattatactcattcctcttaatttaaaaggcttttccaaatcttttgcgttcaccataaaggccgctgatgaaattggtgcaatcgcgtaagaaagaataagcgcaacagagcatacgtttacgagtgcattccatgaaggaaatggcagtgtccaaaaaatcgaaagtcctaatgaaagccatagagatgatcgaggaatccctgtttttttatccacatgagcaaacgttttaaatagcgtaccgttacgagaccaagcatagataagtctagatgttgtattcataaaaatattaccgttaccacccggtgataaaatagcgtctaaaataacaagtgttgctagccagccaaggccaagaacaacagcgatgtctttaaatggcagtgagaatttatcttgaatgccggaccaaccgcctttaatcatgtcagatggaatagctccgataaataatacttgtagggcagtataaatgagagctgctagaatgatacaaatcacaagagcaattggaatattacgctgaggatttttcccctctccagctacagatacaatgggatgaaggcctaagtaggcaaacataaccccgcctgtggcaatggcggcctggataccatcaaaccccccgggagcaaactctcccatcgtaaagtttcctgacttaaaataaaatgccagcgttacgattactgtaagcggtacaaaatatttaaaaatagaaatgataatattcgattttgcaaatgcttttacactccagtaattgagtaaaaagaataagcaaagcaacacaaattgtagaatccatccagatatcgtcggtgaatcagatccagattttgttaaacccggaaaccagtaggccacatactgtctcacagctgttacttcgatagcgattaagctagtgtacgctacaatagtaataaatgaaatcatatagcctacaagatgaccgtgtgaataaacaggatatcgaataattcctcctgtacgaggcaaggcagcccctagctcagcgtatacaaggcctattaataaaataataactccaccaataacccaagaaaaacttcctgcaggaccggcttgcgtagcgacattactaacggcaaacagccaagcggagccaaaaatagcccctaatccaatcaatgttaaatctaacagggatatcgtctttttaaacggacctttattctccataagcttcctcctttggatgaatcatcacttttgttgttttttttgacaacattcatatatattcgataatatacgtcaaaatttttattactatacccattcaaaattactttgaatcccttttcttgatttctagagattaattaacagaaaattcttaaaaataactcttatattcaagacacactaaaactttttcttctcttctttaataggtaaaatactcaagagatgaaaggagttagacaaatgactttaccggaaaatttgcctgttgattttacagcttacagccacttaacattccttccgctcggacgcaaaaataaatcgattcggtccgtaggaagtaaacatactaaagggctacttggacgtttaaatgactactttgagcgagcaatgaatgagttatctcaagaagatatagtcctttttcaaacgttcttatttggaagtcataggggcggttttcctgtggcaattgataaaaatgaagacgtttatcctcacttttggaaaccagcttcatttctatggaaagaatataataagaatcgctgccttcctatccatcatgatgagttttattctcaagattttacggttttaactaaaaatgagttggaaaactacctcggaagtattatgaaagattacatgttttgcgctaggatacatgattctttcaaagaagaatggattcaacatattaataagtgtttcttcaaacatccgctcatttccctttatcatcgaaatgcagatgtgattgaagcaattgaacaatcaaaaaaatcacctttgctttttattatgaaaaaccctgagcaaattgctttttggcgcaatcggattgaaatcattatgagaccttttcgatctctttctcacgccgcctttgagagaggattttcagatacggaagatacggtattaactgttcacggagaaaatgagatcattcgcttaacttcagaaaacagaggtctcgccgtaacatatgatgtcacaaatgatgccatttcactcgatgatgagtataatgtagtgctagcagcgaaacgcttagctacaactcagcgccagttcgaagagattatagatgaaaatgaagaagtgattcaaaaactactggtcttttttaaatggaaaagtcttttaaagcatcatgaagtgcacatcaaagaaatccaagacaaattgtgcagcctaaccacttatcaacttaatcaaagacaagttttacaggaaaacgatccctttctttccttcattcaaaaggtattacaagtaaaaacaccgaatgcaaatctcgaagttggttccattcaatggttttcgcaatgggattttccagatgtcaccctgctgcaggaaacaaacaaatttacatgttgtatggctccaaacgaaatagaaaagaaaatgacagaaataagcgctaagatagaaaatgaacttcataagcaacgtcaggatctgctttcgactccgctaaaaatcggtcaaataacttttgattcaaaccaaatgctacggttactaacacttatagataccttaaagaacacggaaactcagcagagttacgtacaaattttagaaggtgtttctactaacagtattcgtcaaaaagagctcgataaaatacccgcatttggattattaaattccgtgaagcgcaagtgtatcgttacgtatttacaagaattacaaaactatcagctgcttaaaaaagagaaaaaaggattcagcctcactccaaaaggcgaagccatccgacgtctatttgaagaagaatcacggagaatatgagattatatctcgcgtgattcttttttttgattttgaagactactttctctattaaatgcttatcataattagaaatctccattcatataatcattactagattagcaaagtccttcatacctattagcctgatgctgacatagagaggagatttcgccattgaaatctagtaatcgcgccaattttgtagtgttaacatataagatggttcttgttattttatccattgttttaatgacatcatctatcattgttctagtgagttactcagcatttaaagaacagttcaattcttctattgtctatcaaacgttatcgaagcataaagcggagagcctttattatttgatgagccaagaaaaccaccacttttcaacggctttcgataaaaactactcgcctccaggtctttcttctacactgctagagttatcaacaagtattcgagcagaagacgcgagaagcttgtttggttcagaacttcctggattcagtatttacgactccaatattatcatcgccggtgaaggcacaaatttcacaaacttccctagagaatctgcaccgccgttagatgaaacactaaaagaaagaaattctactacaaaagttcagcaacctaaagaaaacaatggtacgaatgctccaaataataatacaactggcggaaaaaaggtattttatatttatcatacgcacagctgggaatcttacttgcctctattaggacttgaaggtgatccagatgctaataaagctgtagatagtaaaaccaatattaatatagtcgcaaatatgctaggaaaagatttagaggctcagggaattggggcagaagtagatcaaaccaatattggacagaaattaaaagaaaaaggctggaacaccaaccaatcgtacgccatgtctcgcacagtaattgaaacggcgatgactgagaatagagatttaacttactttatcgatttgcaccgagattcgcttcgaaaagataatacaaccattaagattaacaataaatcgtatgcaaaagttgtgtttgttttagggaaagcgaatcaaaactttgaacaaaacttaaaaatggcaaaagcgcttcatgaaggtcttgaaaagaaatatcctgggttaagccgtggagttattggcaaaaacaaatccagcggtaacggtgtatataaccaagatgtttctaaaaatgcgattttaattgaagtgggcggagttgataataactttgatgaactaaccaatacaacaaaagcactgtctgatgtcattagccaattttactggcaagctgaaaaagtagatgcccctgctcaataaaaaaagccctcttcactgagggctttttaaaattcaattccttttacagcaggaattccttcatcataataatgtttatgaggcttcatttccgtcacaagatctgctgcatccatcacttcttttttggcagaacgcccggtaatgaccaaatgcatatgctcagggcgcttttgaataaggtcaattacttcgtgtagcggtagcacatcatcaataggaaatttctcgatagccagtgcattatttaactcgtctaaaataactacatcatattcgttcgagaagactttttccttcgttagcgcccaagctttttgcaaagcttcacgatgttcaggcggtgtttttgtccacgtgaagccgactcctgtttgaatcatttcaattcctattctgtcaaacatcagcttttcgccatatgtacgctgaggagatttaataaattgaatcattaatactttttgtccgcgtcccgtagcgcgcaacgcaagacctaaagcagcggttgtttttcctttaccgtctccggtataaattaacgtaagaccccgtttgtctttcaatctaaaaacctctttttcttcgaatttcagtttacagccatgttgttttttctgtaaacggtgttctagcaggctctttcatttttataagagactcttcatttggatagcctagaaatacgtttcctactacgactttacctgaaggcttgccgataaactcatacagcctctcgtctcgaacaagaccaacgcctcttgttctccaaacgaatccaagacctagttctttagctgctagccacatggaatgaatcgcgcatgaaaccgcatatttgttgtcttcagtggcttcgtcgtctccttcaactgtgtcagcattacgacgatatggacaggcgtattttttactgcttttaacgaactttctactaaatggggctttgtaggaaagcgctcctttaaataagcttcagccagttcttcatacttcttttttgcttctccttgaatcacataaaagctccaaggctctctcattcggtcatttggagcccatgtcgctgcttcaagcagctgttcgattttctcttgctctacttcacgtgcttcatgatctcgtaccgctcttcgttcttttagctgtgagataatcgtcatattgtctcctccttttaacattaaagcagaatattttccgctctttcttcgaaccattttattttttctctaattgtcactacctcacctacaagcacgatagcaggatgagcaatttctgctttttttgctatttcttcgattgtggcaagcgttcctgttacggtgcgctgatacttcgttgtgccccattgaacaagcgctactggcgtatgtttatctcgtccatggtccatcaattgcttgcatatatgagataaatttccaacgcccatgtaaaacgcaattgtatctattccttgagcaagcgctgaccaatttaaataatcttttcctttttcttctcttccatgacccgttacaatcgcaaaagaagtggcatgatctctatgggtaacaggaattcctgcataagctggagctgcaattcctgacgtgataccaggcactacttcgtaaggaattccttgagtagcaagcacttccgcttcctctgctccgcggccaaacacaaaaggatcgcctccttttaagcgcgtcactacttttccttgaagcgctttttcaacaagcagttcgtgaatacgatcttggatgactccgtgcttgcccggtaatttcccgcaaaaaataagctccgcgtcttttttagcatagtttaacaactgttcgttggctaagcggtcatataaaataacatccgcttcttgaatacactccattccatatacggttattagcttcggatctcctggtccagctcctactaaatatacttttccaactgtcacacggcatctcttctttctttttttaccgctttacactgttccacccagttttctaccatcttcgtagaagagccaaaatgaaagtgcgtatagccggcaattaaattattgttcatatagccttcttctttcattcctcgcatcccttttgtatcataggcaggcgaaaactctttctctgaatgaaaggttgaataatgaaattcatggcctttagcttgtatatcgcctttaaataaaaaattcccctgctttcccgtcacttctcggtaccctaaagcagctaattttgtctgcattcttacttgtccgggaataagccccaccatttcatggcatgtatcatctgttgtgacaataccatctgttaaaaacataaagcctccgcactcagcaagcgtaggaatccctttttgaatagctgctcgaacagaatttttaacgtcgatttgctgagccagcgtttcagcaaattcttctggaaatccgcctccgatataaagaccgtcagcatcttgtggaaccacttctccttttaaaggcgaaaattctacaagctctgctccgtaagcttttaacaattcgaaattttcttcataataaaagttaaaagccgcatctctcgctacagcaattttcacttgaggtacggacggctttgtaaagataggctcattaatttctattttaggagctaaagccagttcatatactttttcgatatcaattgtatcatgaacaagctttcctaactgttcaaaaaacggtgttaactctcctcgttcaatcgacggaatgagcccgaggtgacgttcaggaatcgtaagatcatcgtttcttttcaagtagcctactacagggatatgacattcctgctcaatcgctgccttaacaagtttataatgcccttcacttccaacacggttagcaatcacaccgacgatgttagcttcgggtaaaaattgctgaaaaccttttacaatcgccgctgcacttctagccatactagcacaattgacaactaaaaggacagggctattggtgattaagctgatttctgctgttgttccttcgttcgttaacgggtttttcccatcgaaaaatcccataactccttccatgatggaaatatcagcatcttcactagcacgagcgacaatttctctaaccatatcgtgttcaagcatccagctgtctatatttcgagatgttcgttctgtaacagtcgtatgatacgttggatcaatataatcgggtccgcatttaaacccttgaactctgtaaccagcttgtcttaatgctgccatcagcccgattgtaagtgttgttttccctacgccacttccagtaccggcaatgacgagtcttctgtttgacatgttgttctctcctttagtcatagggaataagcgccactgaaatggttacattccctgactttttcttcacaagttcaagcttatcagcaccgctgtataacatagcagcaggttcactgacgccatatgcacctgtatatttaaagacagtatctgaaggctgttggatacttatgctgtttagctcttggggcgaataatagacaaactcccatccgtacttagacgccacttctaacagcccttcttcatctttctttaactctattgtacataatgcttttacacttttcattgaaaactgaagttcagcaagcgttttttcaataacggtttcaatttcagctgtacttgtccctcgattgcatcccatcccaatcgctaatacttttggccggtaaagaacaccgttttctaagattgcttcttcctctttttttaaattgcgatgcgttacgatcaaagctgcatgtggcgatgcttcaagagctgtctgaatcgatgaatatgttttaatgttagctggaacagggtgctcataatgccaccagttcttttcacctgattcttgaaccactgctatttcttcttcattcaccacagaagcgctgacaggcgttagtttttctgctgactcccacacccatccaaagcgcttaccaaataaatcaactggaattgttttttgcacatcggatgctgttgtaataacaggatgagcttcaagaactgccgcaacttcacgcgtaagctcatttgctcctccgatatgacccgaaagcacgctgatgacattttcgcctttatcatcaatgacaacaaccgcaggatccgtttttttatcttttaaaataggagcaatcatacgtacaactgctccgagtgagataataataataagccctttatacgattcaaaaagagaaggcaaaagcatccgaacgcttcctgaaaacagctgaatgttctgctcttgttcgtctcctttttcaaacttgctcatgtaatacacatcagactgctgaaaagtgcggcctagatttcttgcaatttccacgccgtgttttgtgatagctacaacggcataatctccgcgctgtgtaatgagggctttttttccttcttggagttgaatcattccgacttcactcctcttcgaaagccatgggtaaatgttttgtcataaagttttgaacgataatctttgtcatgaatgtgtggatcaagtgcccagcctgccaaaatcatcgcctgcttgcgaatgccgtttgttcgcatagcatcatcgaggtcttttaccgttgtgcgaacaattttttcatctggccacgttgctttatagactactacaatcggcgtgtcttcactccaacccgcgcttataaattctttcattactttttttgtgagcgtcgcgcttaaaaataacgcaatggtacatttatgttttgctaaatcagttaatttttcaaactcaggtacaggcgttcttccttcagcacgagttaaaataaccgtttgagtcaaatctggaatggttaattctgcttcagccgctgcagcagcagcgaatacggagctgacgcccggaacgatttcaatatcaacgccttctctttttaaaagcaccatttgttccataatggctccgtacatagcaggatctccggtatgtactcttacaaccatttttccttcacgcatgcgttcaagcatcgtaccgaccatttcttctaaatgcatacccgctgtttttaacacttcagctcctggtttagacttagcaactagctcttgacttaccagtgagtcagcgtacaagacaacatctgcttgctgaagtaattttaagccttttacggtaattaaatctggatctccgggtccagctccgattatgtataacttcattttcgcaccaccattagcgttaagtattgtaaatcagctccttctagttctgaagctttccagataatttcttcatctgacgttacttttgtcaccactgacgctttttcaagcagatcaagctcttttaaaagaccaaccataaaatcgatgactttggccactttaataaaaatgacgcagtcgttttccattaatacttttttcattgtttcataatcttcacgagcaggaacaatcgctacatgttcatcaccgtctgctaaaggaatacctaagcgagatgccactccattaatagatgaaatgccaggaattacttgaatcggagcttcagggtgacactcttgcattaaacgcatcatgtgaataaacgtgctgtaaagcatagggtcgccctctgtcacaaatgctacatcttttccttcttcaagcttttcccatactcgctccaccgtttcggtccattttttctctaagatagcaggatcttttgtcatgggaaacacaaggccgagcatgtctttttcatttgcactgaaatagacatcaataattttttgggcatagcttttgcttcctttttgctttttcggatacgcaataacgggtgattcttttaatttacgaaatgcttttaccgtgattagttctggatctcctggtccaactccaagtccgtacaatgttccaatcatgttcattctcctttttgagctgtaataatataaatagggtttaaagcatcaaagcgtgttaaatgtaaaattggcttgctccttgaaatttgtgcaagggtaacagcagtctcaaatcctcgctctttaaaagctttcatcgcttctgctaaattttcaattgtcacggcgtttaatacgatacgtccttctgaatttaagcggctgcagcacacgtccaaaatggtttccatgcctcctgctgtccctccaataaacactgcatcaggatcagcaaactcatttagtccttctggtgcttttccgtgcacagtgtgggcatcaacccgaaatttcgctagattttccctgcaattttctaagtctgcttcatttttttccacagcaaaaatttgtccttcacgcgcaattttagccgcttcaattgccactgaacctgtacatgttccgatatcccacacgacgctgtctttctttagctgcagggcgctaatactaagtgtacgaacttcttttttagtgataagtcctttatccggcttgcgttgaataaattcatcatcttctattccaagaggccaaactgggcttttttctatctgttttaatatcacgacattaagcggagaaaagagttgattcgccgcttcttccagcgaaagcagctgacagcgctccgttttcccacctaaattctctgctacaaacatcttgtattctgtcatgccaaatgacaataagtagtttgccagagcactaggagaattttgctcatcggttagaatcgccactgttctatagccgtcaatgcgctgagccagcccttttatgctcctgccgtgcacgcttgtaaaataagcgtcttgccatcgctcctttaggcgtgagaatgcaagctgaatagaacttaaataagggtatatttcaacgtctagcttcgtagaaagatagcttcctattccgtaaaataacggatcacctgaggctaacacaaccgcatttccttcttcgttttttaaacgttcaacaagagaagaaagccctccttcaatcgccactttttctcctttgaaatcttgaaaaaaatcaaggtgacgcttacctccaactagcacatcgctttcataaatccacttttcatacataggaagcaaacttaactttccgtcgtcaccaattccaataattttaattgccatgttgcaccgcctgtcctaaaaaatctccttttaatgtgtaaagagacgtatcgacatcgattccgtcccctacttcctttaacgctgataaacagcagtactcgcacagtttttcaaaaaactgatgatgaccgctttgtgtcattaaatctcccacttgagaagctgtgtttgcaccttttatttcctctaccagttcagcagaagcgcctgactcagaagctgcttttgctaaaaaattaaaatcaatgggtgcactttttgaatgaaccatcataacgccttgcgcgacttttgaaaactttcccatcatgcctacgagcgatacttttttcattccttgctttttacattgttttaacgtaaatccaacaaaatctcccatttcgataaatgcttcttccggaagatctgggaactgtttcattccatacttttcgcttcggccccctgtcgtaatgacgacgtgctcacaattacttgctttagcaacgctgattgcctgcacgatgcttgctttataagcagctgttgagaacggaacgacaatcccccgcgtccccagtatcgaaatgcctcctaaaatacctagacgcgcatttaatgtctttttcgccatttcttctccctgaggaaccgagatgacaatcttaacgcctttttgtatattgtattgggctaaaagctgttcagccgtttctttcagcatctttcttggaacagggttaatggctgcttcaccgacaggaaccgggaggccgggctttgtcacacgccctactcccactcctccatcaatgataatgcctgcaccattacaccacgaaacttcagaaataatcagcgctccgtgcgtggcatcgggatcatctccagcatctttaatgatgctagctacagcgctgcttgtacgatactcgcattcttcaagatgaaacgtagcaaagcggccgacaggtaggtaaatcgttgactcatcttgcacttctcctgaaattagcgtaagcagagctgctctcgtagctgccgttgcacaagcgcccgtcgtatagccttctctgagtttcttaggttcttttggtacttccttcatgcgttacacctgatctgcaagaattgaaattgcatttaatgcagcaaccgttaccgtactgccgccttttcgcccgatgtttgtaataaacggcacgtcaagttttgcaagttcttctttagattcagctgctgaaacaaatcctaccggcagaccaataacaagcccaggcttcgcttctccttctttaatcaaacgaattaattcaagtaaagctgtgggtgcgttcccaattgcaaaaattccaccgtctgcttctttgatggcttttcgcatagaaataattgcacgcgttgtatttaagcgctttgcttcttccattacgtccggatctgaaatataaactttgatttcaccgccgtgtttttcaattcgctgcttgtttgttcctacttgcaccatttgtacatctgcaaccacttgcttgccgctgcgaatagctttaattcctgcttgaatcgcatccggatgaaacagcatgctgcgtccaagctcaaagtctgcagacgcatgaattacgcgctgaacaattgggtactgttcgtctgtaaacggatgagacccaagctcttctgtaatcatctcaaaactttttccttctatttgctgaggctgaacagttaacggtttaaattctgtacgaaaatccatctcaatcaactcctagtttggtttactaaagcatgaaccacttcttcaaaagtggaatacacggtcccatactcaattttcggtcgcccaatcataataatatctaagcctaactctttggctgcttccactttttcatccacagatccaacttttccgctttcttttgtgaccatgaccgtcactccgtattgcttatacagtgctcgatcaaactcttttgtaaaaggcccttgaatagcaataatatttttttgcggaaatcctaattgctggcacttttccatattatccagccttggaagcatacgagcaacaagccgtacatctgaaagaggaagcagcttttctgtaaaaacctgcagcgttttgctgcctgttgtcagcataataactccttttttctcagctgctacttctgctgcttcttcatacgtagaaaccatcgtcatattatcataggcaaaagcctgcgaagcccgctcatagcgtatgtaaggaatcgctgtttcagcagccgcgccgatagcatttttagatgcttcttctgcaaaaggatgacttgcatccacaatagcttttacacgatgttcgtttacaaaatccatcatatcttcttttttgagacgtccaattttcactttcacttctgcacgctgtaattcgatagctgcgttttcggttacaaccgttgccgtaacctcatgacctgcttttttcacttgcacggctaatgcacgtgcatcgctagttccggctaacaataaaatcattttagctcgccgaccttatcttcatggtggtcgtggtcatgatggtgatcgtggtgatggtgtccgtgatcatggtcatgatcgtgatgatggtggtgatcaatatgctccataatgccgaggcgatattgacacgtatcgcagttcattttcacttcaccttctaatccttcttcagcacgttcttttaaaattgtctgcagttttggatgaaaaccgaaatagccagctagcttaaattcgatgttttcatgctgcattttatactgcttcaccatttcttctaatcgcttaattagtactcctgtaaataagaaatacgggagaataaccacttttttagcgcccagttttaaacatcgctctaccccttcatcaatcagtggagcagtcacgcccataaaagaagtttcaacgattttatagtttgttttttcccaaagaaggcgcgtaattttatatagatcactgtttgcatcaggatcacttcctcctcgccctaagacaataacagccgtgtcttcagctggagtttctaaattctctcctgattcttgtaatctcgtttttaaaatttccagggcttcttcatgaacgccaatgggacgtccgtatacgaagtttacgtgtggatattttcccttagcttcatctatagccgccggaatatgtattttagagtggccggcaggcaagagcataattggaattacaactacatcttttgctccttttgccacacatgtatcaatgccttgacttacatttgggcgttcaaattctagaaaacacgtttctactaaaatagatgcgtcccaatcatgcttcatagtcgaaataaattcgcgaatttgatcgttcccttcaggatctctgcttccatgaccgacaaataaaactgatttcatataatgccctcctattttttaatctccacacggagctggttctacttttatttttggtgttatatcttgatagtcgaatccataaacgttcttcacacgcttaaagaatttatgaaatcgctcattaggatgacctttttctttatattcatggacaatgttctcgactatttcaataatgtcatcaggtgctatgccttccgccacaatttgacctgaatgcgcattgcgtccaaccgttttagctcctaaaaataaatcaaacgcaccttttctatagacaatgccgatatcttcttgaactgcgccatagcaggccatgccgcatccattaataccaagcttcagctcttttggcatgtccattcccccgaggcgcttttgtaattcttccgtatgtggaatagcatcgcttttttctccgtcacaaaaatcacacgctttgattgtgaacacatctccgaccggagatagtaaaaaggaagctgcttggagctttttaataatcacatctggttgagtcgttgggatttgcagtttgatttgatggtcaggtgtatactccatcgtacctttttcaccaacaacttctgctagtgttgtcatttgaacaggcgtgaatttcttatttgcaagtcctggactaaccgccacttcgaaaatggactgtattggctgatgtacgaccgcagaagtaggttcacctaaaattgcttgaagcgcttcttctgcaagaactcgtgaagttgctgtttcttctggtgtggtctgaactgcttcaatagctgaagctgtttgctttacagtctcttcttgatcgagagcccacggttccgcttcttttcgaagtcgctgatgcggtcttagcggctgctccgtttggttaagggtatatttccgctgatatccgcgcggtgtaatcattaaatcgtcgtaaaaaaacgtagatgaattcccgacaacaacggtagtcagcatgccaatttcatgatttaacatgtcttttaagttggtcattacgacttcttcacggtgacgataagcgcttttcacaagaccaacaggcgtatcaggagaacggtactttaatagaatcctctgtgcttcaacaatttgtcttgttcgtcttccgctttttggattgtaaaaagccactacgaaatctgcttgtgcagctgcttcgattcttttttcgattagttcccatggcgtaaggtggtcacttaaactaattgtacaagcatcatgcatcacgggcgctccaaggagggatgcgcatgaattaatagccgaaatgccaggaattacttccagctctacgcccgtttcttttttccaacctttttcaatcaacacttcatacacaaggcctgccattccatatactcctgcatctccgcttgaaatgacagccacggtttttcctgcttcagcttgctttacagcttcttgtgcacggcttacttcttcggtcattcccgtactaataatttgctgattcgttaacagtccttgaattaattccacataggttttgtaaccgatgatcatatcactttcttgaatggcttctcttgctcgctgtgtaatatgttcaaagcttcccggcccaaatccgataactaacagtttacctttcatgctagctcctcctttatgcgttactttttactttatcaattccttctatggagtcactgttttccggggaaacgaaaccattttgatcatattcataaataatcgattcctttatactgcagcctcctgctaaatgttcttcgacaatccggtgagccacggtttcagtgacctgcttgtaccaatctcctgaaggatacacaatagctacaggagcatctttacatcgtccgttacagcgtgtacgcgttgtatgaaccgtttcatccaaatccagttccgtcactttatttcgaatagcttgggtggcttcttctccaccttttctcatacagctgcttccattacaaatcaatacgtgatgttttgttccgtttaagttccacgtcgtcacactcattcgctcctttactaaaaaaagcgcctctatcaatgatagaggcgcagaaaaattcaaactaagtttttgcacttccacctatatcccgtagggtaagcttcgcattaaagaaaggctggtttcctgacttcgattcatcacttgactgcgccttcccgaatacagtggcatatgcaatcagctcatcttcacagtggcgggtaccgcgctggcttcacaccagacttcccatttaacacaatgtaaacattgcgcaccttttttgcacgatatgtagttttacgacatgagaaaaacccgcttcgctaatatgcgagcgggtaaaacgtcagaataagagtgtacacgaatgccactttaagccaacgtttcccttcccgctccccgaagaaatagaaacttcacaataaagacaggtctcctgacttgtgtatcattctacttgagaaccttcccgtgatttttccacagtggttatactcgttcgtccacacttacagttgcgggggcagtactggtctttcaccagtttccctattaagccttcttggcatctttgttgttgctgtttgatatatatgaaccttttaaactatcagaataatagaagtaactaccatatcatagcgtacatttttttttatttcaactctattcttttcgaaagatacaagcatctataaaaaaaacaagagcataaagtcagctcttgttttttcattatatagctactaatgttaaatgaggatcgttataatacaccacttctgaaagaactttacagccatttgttttggcaaaagcttctctcgcctgcttttcagtttcaaattcaaacattttcatttcttttccagcatataccgtcagtacccacatgaaaagattcgcctccgattattgtagggatcgttatatccacattatgccgaaaccatttccttttgaaaacccattctacaaaacttgtcacaagaaacttttaaaaatttaaaaacattttaacttctgtaaatgaacaaaatgtacaaaaggtttaagcaatattacacctctttaaaaaggtgctttttaaccaactgttgcttcaccagtaaaaaatatatagtatttattaaaaaaaagaagccggacagccggcttcttttttaggaaaggaaagtacagacatcacaatcccgtacttctctttattttgcataaaaatacactaattaaatattcctttcttaaaacagaaccatgttcgactgcacatagtgataaagaagcttatacgtatggtttaatgaatcttgatgcgttctctcaaacgcatgagaagaatcaattcctggaccaattaagccgtgtacgatatcatgtccagcacgaatagcagcagaagcatctgacccgtaaaacggataaatatctaatttgtactgaatatcatgctgcttagctagctccaccaaatgctttctcaaaccgtaatgatatgggccgcttgaatcttttacacaaatagacacggtgtattcatcggtagattgtccatctcccatagcacccatatcaaccgctaagtattctactgtttgaggtgtaatgttcgaatttcctccgtatccaatttcttcgttatttgaaatgagaaaatgcgtagtgtatggcagttcgatctgttcttcttgaattgttttcatgagctgaagcaataaagctacgcttgctttatcatcgagatgacgagatttaataaaaccgctttttgttatttctacacgaggatcaaacgaaacaaagtcgccgacttcaattccaaggctgcgaacatcttctgcgctatgtactttttcatccaatcgaatttctatattttcttgatttcgctcagctttccctgcatctttatacacatgaacagatgtttgatgcataaggatggttcctgtaaatacttctcctgatgaagtttcaatttcacaatattctccttcaatagaattgtaacgaaaccctccaatcaagtcgattttcagacgtccactcggtttgatttcttttaccatagcacctaatgtatcgacatgagccgtcagcatgcggtggtgatctgtatctttaccgggaatagtagcgactaagcctccttttcgattgcgatacgtttgaatatttagctcttttacatagtcttcgacaaatgaaattatcttttctgtatttccagaaggactgggaatcgaaacaagctttttaattaactgaacagtttccgtcattatgacacttcctttgtctctcatttcttttattttatcatatgtttcaaaaaagataacaggcagctccaaacaaaacaagccgggcagctgcccggcttgtttgttttaagctatgtttgatttctttaattcatttgtataatttaatgatttttgcttatcaaattcgccttcagacttcgacatcacaattgcagctaaagcatttcctactacgttaactgtggtacgcatcatatcaagaatgcggtcaattcctgcaataaatgccatgccttcaagagggaagcccatagattcaagtgtagcaagtacaactacaaacgatgcccctggtacaccagccattccttttgaagttaacattagcacaagaaggagctgaatttgatccataatggaaaggtcgatgccgtacatttgagcaataaatagcgatgccagggcctgataaatggttgaaccatctaagttaaacgtgtagcctgttggaataacaaacgatgtaaccgatttagaacaaccgaagtcttccatctttttgataagagatggtaaaacggcttctgaacttgccgttgtaaaagcaagaagcagctcgtcttttaacacttttatcagcgtaaacatgcttgttccagccattttagcaataattccaagaaccacaagcacaaagaaaatcatggtgaagtaaacggcgaacactaattttcctaatggaataagtgatccgacaccaaactttataatattaacaccaataagtgcaaatacacctactggagcaaatttcatcaccaaattagttacccaaaacattgcatccaagacgccttcaaaaaaggctaaaacaggttttcctctctctccaatcgaagctacgcctacaccaaacagtacggaaaataaaatgattggtaaaagatcgccttctgctacggattgaaagacgtttgtcggaacaatatgaagaagctcttgagcaatccctgtactttcagacgtttttgccgttgcctcatattgagaaatatcgcttttttcaatatgtcccatatcaacccctgcaccagggtggaataagttcgcggcaataatcccgactacaatagcaatggttgtaacaatttcaaaataaagaattgtttttccgccaagcttacctaattttttgatatcgcctactcctgcgaccgctacgattaatgctgaaatcacaatcggtacgacaatcatcttaattaaatgaataaatatgtctccaaccggctgtaaaatagaaatggctgtatcgcttccataaaaaattgcacctacagctacgcctaaaatcagtccaattagaatctgagttgctagacctaaccttttcactctcttgctcctttcgcacagttgactttcatccatcgagcatatgcggttccgcgaaccgtgtataaatatacatccttacagcaccttatgtaaacagttctttactaaaagggtgtaaggccgcacatgcgaatttttaaaagccacggttctgttttatcatatcaaataattgttgtatattgagatttttttgctaagtatttttctatttttgctatttcagcgaataaattaaaaaaataaaattttatattgaaatatacattttaggttagtataatacgatacatgtttatttttattattcgaatataaaattctgaaaattttaattattcaacacgataataaaaagcatttataattttggaggttttaacgtgtcaaacaaagttcctttttcatttatagtggttattggctttatgctttttgccctattcttcggcgcaggtaatttaatcttccctgcaatgttaggtcagtctgctggaagcaatatttggtcagcaaacgctggatttttagtaacgggtgtaggtctgcctcttctaggcgttctcgcatttggtttttccggaaaagaggatttgcagtctttagctagtcgcgtacacccagctttcggtattatctttactacgattttatacttggcaatcggaccgctttttgcgatgccaagaacgggaagcgtttcgttcgaaattggcgttaagccttttttatcagaaaatccagggcatcttccccttattattttcacggtaattttctttactattacctgctttttttcgctaaatcctgcgaaaattgtcgatttagtaggaaaagttttaacacctattaaattaacgtttattggaatattggtagttgtagctgttgtgaacccaattggaaaatttgaagcaccaagcgaagcttatacaacacactcattttttaaaggcttccaagaaggctacttaacaatggatacactagcatcatttgtttttggaattattattattaatgcaattaaagaaaaaggagcaaaaactaaccgacaaatcatcacaatttgtgcaaaagctacggctatcgctgccgttattttagctcttatttatagtgcattgtcctatatgggtgcttcaagcgtatcagagcttggacgtcttgataacggaggtacggttttggctgaagtatcaaattactactttggctcttatggaggaattcttttaggtctgatgattaccgttgcttgtttaacaacaagtgtaggccttgtaacatcttgttcatctttcttccataagctgtttccaagggtttcttataagttgattgctgtcattttatcagcattcagcgctgttgtagcaaactttggtttaacagaattaatcgctatttcggttccggtcttaacagctatttatccgttagctattgtgttaattgctttaacattcttacatcctttatttaaaggacgttctgaagtttaccaagtaagccttctgttcacgtttatcgttagtttatttgatggcttaaatgctgctggattcaaaattgcggcagtaaacgatctgtttacatcgatcctacctatgtatggagtgggtctcggctgggtagttcctgctattgtaggaggattaatcggtcttggcattaccttccttcgtacaaatgataatacgaacagaaacacttcaagaaaattgattaaataaaaaagaggatgcgagtgcatcctcttttttattatggcgtcttatgagtaaggagtttttttctccattaacttcacttcttcttttaacacatgtttttcgtatagatatttatccgttcgttgaaaatgatatttatcagctttttctttttcagatgtggtcaaaagcactcgacgatcagaagcatctgacacaccaaacgtttcattttgataagtagcatacggagctacaaaaaacacttcttcaacagcatcacgaggaacttcttttgtaaaagtcgtgtcattgtatgaaatgaatccatttgctacatcgcctttatcatagctaatcagctttacacacccgttttccgtttcataacattcgtaatcccgttcattatatgctgcatacaaaccttttcgaatcacaaaaaaccagtcctttacattggattagcaaccgctggcacaaatcgtttttcttctgccatataggtagctaaaagtacttcttccccatttaccacttggtatagttccgctccgtttgctggtggataatagttatcaaatttgaactctggaacggtttccccgtttcgagatcctgtaaacccattaagcgtacatggaggtccgtctattgtttttcctccgaacacagttccgtagggaatatcaacatggcttaccgcttgcgatttgaatttgattacaccgtacgtcgatccttcttcaggaaacggccttttacctgaaccatcggtgtaatctaaacgtaagctttcaacaaaatctttgtacgaagcaatatcatgaacatcttcagctttagctacatatcctcccactgccgtataagatccatctacatacttttcaatatctttagcagggatcgttttttgcagcagcgtatcttttgtaaggggagaaacagaatcacgtatagccttcattacttctatttcatgagaagttaatgttttagcatcctttaattttagttcattaaactccttttttgtaagattgacgcgcttcagcacttcattaattttttgatcgaaatcttctaagctttctaaatctgaagccgtataatgagcatcaactgtccttacatctttatatacttttttaacttcatttaattcatactgttctacttcatcagccgttttaaacgtttcaacgcttgaaatggttttgccattcgtatcagctacaacgtaaccgtcttcagcttttattacatatccgacttctccgttacctaacgcaattaagtctgactgttgaaaaacggctttctctttttctttttgaaattccttatctgtcattcccttagtaacgagagctttaagttctgatatgtctttactgtctttttgatttgcttctactttctcagctgtaactgatgaagtttctgtattagatggagaatgagtgaccgtcccgatgacaaaaataagaccaaacacaatccctatgccatacaaaaatttgcttgttttatgagctctaaataaaattcctaacacaatgcaaacaatacccgcaatcaagctatctactaataatagatgtcccaaccaaacccctcctctttaattcttatttatgttaaaaaaatccacaaaagaggtcaatacaattaatgtaaataaagttttaaataggaatatattcataattattactaattaatcccttttagtaggtctcaaaaataaaacacaccacctaaaaatagatggtgtgtgaagtatagtaagtaattaagaaatttgtttaagttctgatgagagttttaaaaactcttctttatttttcatcaatagcgtgcggtcgatttcttcttttagctgtgctttacgaaattctgcaatcgccttgtctaaaatcatctcagcgaataatgcatcaagcacctttccgttggatttttgcggtgaattaagtaaattctttttcataagaaatcaactccttggcttttttataatataacacaaatattctgacttttcaatcatttaaaccaagtattttaaatctatttttttcacataaaaaggccgcccttttgttataaagcgcggccttttattacgaatctgaggctttttcttttacttccgcatagtaattttcatattcaataaattcaggagcttgatgagctgccatgataccgtggtagctgatatctaagcccacttcttcttcttcttccgtagatcgaagcggaaccaccaaggaaataacctttaaccctatccacgtcgtaacaaatccccaagcgcatagagcgattaacccaagaagttgaactccaagtaacgtccagcctcctcctgtaaacacaccgccgtctgtagaaaacaaacctacagccaacgtgccccatattcccgaagcagcgtgtacaggaaaagctcctacaggatcgtcgatttgacgtgcttcgagccagtttgtagctgccatcattaataagccagatacagctccaataaaaatagcagatggtgtgttaacaaaagcgcacccggccgtaatgccaaccagtccagcaagcgatccatttattacagaaggtgcatctgaacggttgtagcgaaataaagtataaaataaagtagctgctccgcctgctgctgctgataacattgtgacaatagcaatgtgaccaattctaacgtcagtggcacttagcgtacttcctgcgttaaacccgaaccatccaaaccataataaaaaagcacccactgatgcaagcggcaaattgctgggaagagaaacagaactaattccatttttcgtgaacttcccttttctcggtccaatcattattgcagctgctaaagctgaaaaaccaccaagagcatggataaccgccgaaccggcaaaatcaagcatccctaacttactaatccatccgcctccccagatccagtggccggctataggatagataaatgtagtcatcaaaatcgcatataaaaggtatgcacggaaattaattcgttctgccactgctccagaaacgatagaaatgaccgcaataacaaatgcacattgaaacaaccaaaacgtttcaagcccaattggaatgtcaaggtgcgataaattacctgatagcgcaaaaccgcttttaccgacaactccgcctaaatcatctccgtacattaatccaaaaccaattaaatagaaacaaagcgttcctattgtaatatcagcgaatactttcataataatattcacactatttttgtagcggacaaaacctgcctctagcaaggcaaagccgccttccattaacaaaatcatcgccgctgttaacacgacccacgttgtatttatccctaaacttagttcattaacactcatatcccaacgcctccactgctttttaatcgttttatttcttgtacaatagcaggcgaaagtgtaatttcacttgtttcttcattttccgcttttattaattcaagaacttcatgaagttctcgcatttgtgctttaaggtgatcaatttttttaaagcgttcctttacgtataccatatactcgaccgcttgatgctgacttaaaggacgcccggtaaaaaatttacgaaacggcgatagtgattgataccaagcttcttcagcacgtttcttctcttcgtatttactaattttcgtttttatatcttctatttcttgtgctttagcttcttttaacttcattataaattcaattaattttaattgaggcaatgtaatgaccacattatgataaagttcatccactataaccatgttatatctccttacataagatgttatattctgattatatgtagaacactatagtaagtcaatgtaattttttgaaaactctttaaatagtaaatgcgccctatctttttaatacttatagaatattaagtccgtatgtgttgaaatatgacgttatttgttttatcgtaggaagaggaatcatgttagttccctattttaattttatttacctaggcaattattcactttatttcttataaacttttattaaacatagggttacgaggttcttcacttattttttcaacgaaatgagttgattttatctcgtattaaaattaaaatagaattatgtgcaagatttcacaacttcacaatgtagtttgaaagtctagcagataactaggaactacatatgcaacagtatccagcaaaggaggacttttcatgtctcaatcaactattcaaaaatcagctgcagaggaaaatgctgctgtacaaacagaagcggcagttaacaaaggtcaagcggatgtgttagatcaattgttaaagcctgaagtacaagaagctcttactgttcttgtagataatttaccaaaattatctgaaatggtaacggtgcttacaaaaacttacgacgttgcgcaatcattattaactgacgacgtattaaaagaagatctacttggtggagtaaaagaatttatcgagccggtagaaggaacagtaaaaggtcttgcagctactgcaatcgaagcaaacgatcgtgcagaagcaaatgcttctaattcaatcggtttattcggtttattacgcatgcttaaagatccacaagctcaaaaactattccgctttgcacaagcgtatttagacattacaaacgaaaaacaaaaataattttcattaaaaagtgtggacggaggatcgactatgtcaaaacatattttaattttaggcggcggttacggtggtttattaactgcaatgacagctcgccaacacctaagtgcggatgaagcaaaaattacagtagtgaaccgttttgctactcaccaaatcattacagaattacaccgtctagctgtaggcggcgtttctgaacaagcggtagctttaccacttgataaattacttaaaaactacaacgttgatttaaaaattgcaacggtaaaagaaatctcaccagatcaacgtgaagtatctcttgaagatggtacaaaattaagctacgactaccttgttacagctttaggtagtgaaactgcttacttcggtatccctggtttagaagagcacagcttcgttcttaaatcagtaaatgatgcaaaccgtttacgtgcacacgtagaagcttgtatcgctgaatacagcaaaacaaaaaataaagctgacggtacaatcgtagttggcggcggcggattaacaggtatcgaacttgttggtgaatacgctgacttaatgccaagcctatgtctaaaacacggtgttgatccaaaagaaatttctctatactgtgtagaagcagctcctacagttcttccaggcttccctgctgaattagtagagcgcgctcaatcaagcttaacaaaacgtggcgttacatttgttactggtacacctgtaacaaaaatggatgctacaactgttgaacttaaagacggcagcaaaattgaaacaaaaacaatggtatggactggcggagttcaaggtaattctgtagttgctaactcaggtatcgaagtaaaccgcggtcgtgcacttgtaaatgaattcttacaatctacatctcataaagatgtattccttgctggtgactcagcggttgtaatgggtccagaaggtcgcccttacccacctactgctcaattagcttggcaaatgggtgaagttgtaggcgtgaacttagcagtagctattcgcggcggagcaatggaatcattcgttcctgtcttctctggtacactaggaagtcttggacgaaaagatgcaattggtacaatcggcggaaacaaaacgcaattaaaaggtttaccagcatcacttatgaaagaagcaagtaacgttcgttacttatctcatatcaaaggattatttgcattagcttattaatccgtcttaaaacgaaagaggaattctcctctttcgtttttttatttacataagccaagaaataagaagcggcagcgtaatcaacgataaaatagcactaatgacaaaagcagatgcggtttcgttttccaagctttcaaaccgcaaagcaatcatcgcagctacagcagacccaggaaaagctaccagcaaaatagcttttgtcacttcatctgaagataatcctatccatactgcaattccgagcataacgatgggttgaaccgctacttttaagacggcgatcccaagcgcacctttactgaagttaatttttccaattccaatcgttactcctaccgcaaacaaagctgctcccgatgtgatacttccgatttgatcaagcatatcctgtaaaagtttaggtgactgaaagccgcaaagcgttaaaatcactccaattaacggtacacatgccaaaggctcagataaaccatgcaaaatggaatgaaccgttactttgaataaacttgttttctcttccccctcttttcgcccccgttgtccaacggttcctaaaatcgttgccagcgggtctaaaatcgcgtttactacgattcctgttatggcaattggaatcgctacggcgcctgcaccgaacaatcctccgagtactggaatgcccataaaagcaaacgttggctgagctgagtttagggcaaacatagaagaagaagttaacgtatgcttccctgcatacttcacgacgagcaatataatgatgtaaaacccgacgattcctaaaatcagcgctactaaaaacggccattcgtctatgagtgtttttcttggagttgtcgttacacctacaaataagtgtgcaggaagcgcaaacttcgttactaatgtgttgagccccttagacgtttgcttattaaattttttaaagtgccctgctaaataaccaagcaaaatgacaaaaaagataggcgcgagaatgagaaaaatttgacctatgctcatttatcattcacctcattcatttcttgccttaaccggtttataaacaggctgccatgccgctgcttctacaagttcagttacattttgcttggtaacagttgctacgttatcttttacagcagcatcagcaactgctacagcaaccgcctttgatactttttgaagatctttaatgttgggaagaagcgtatctccttttgtgtctgtttctgctatacgcgctactgcattggctgcttctgcaaacatagattcagtaaacttttgagcgcgaaccacaattgcacctaaaccaagacccggaaacacaaaagcattattagcctgtccgatttcataagtgtgcccgttatattcaacgggttcaaatggacttcccgttgcaataagggcttttccttccgtccattttataatattttctggaatagcttcagcaagtttagttgggtttgaaagcggcataatcaccggacgctctacatgctttgccatttctttaataatttcttcggtaaaagcatccgtgacgcctgatgttccaattaaaatagtcggcttcacttgcttgacaagctccaacagtgaaattttattttcatcgtctttttcccattctttaatctcttcattttggcgaacatacggctgttgaaaaggagctaaatcttccatatcttcggttaacagacctctgtaatcatatgcccaaaaacgatcatacgcttcttcttcagatagcccttcaagcatcatcgcactatgaatacgatcagcattcccgattccggcagatcccggtccaaatacaacaaccctctgatcttttaggggcgttcctgtaatacgcaccgctgttaaaacggctgcaagagtaatcactcccgttccttgaatatcatcattaaacgttaaaattttatcgccgtattctttcataatgtgacgcgcgttaatattcccaagatcctcccaatgaagaagcgctttaggaaacttggtcgttatttcttttacaaattgagcaataaagcgattatagtcttctccttttactcgctcatgacgatttcctaagtacaaaggatcttcaagaagctttttgttattggtccccatgtcaagaacaacaggcagtacgcggcttggatcaattcccgctgccgctgtgtagaccgctaactttccaacggcaatatttatccctcccacaccccagtccccaatgccgagaatactttctgaatccgttacaacgagcaaatcaatatcttcgccgtcgagtcctaagttttcaatcgcctcacttaaccgatccgcttcatttacggataaatatagtccgtcaggtcgatggtattcatggctgtattcttgaatggattgacctacagtaggcgtataaataatgggaagcatttcacttaaatgatcgcttaataaacgataaaataagacaacgttccgattatgcagatcatttaacgaattatttttttgaagatcatttggcgcttttttgaactgctcatatgctctttttgcctgttcttctaacgttaaaaccgttggaggaagaagtccctgcagatgaagctcttctctctcttcttcagtaaaagcagaacctttatttaaataagaagtggataaaactgattttccttttagtgaagttgaaattgacccacctttttctattttatatgctctcatgtttttttacctcttttcctaaacaattagatagggttagggtcagcaaagagatatatttttaaccatttatttttaatgaaaacaaaaaagagattgagccataactacatcaatccaatctaaaaacgacaaacgggataaatgagacctaacaacgttcaacctaacaataaaaaatccgaacgattcatcgttcagatcttccttacacgaaaatacgttttttccgcctcgttttttataccacgctatagttttcctgctcactttctgagtaattaggtggctgtatatgtgaaggcacaagacattcatagctttccccttctagtctatcctccagctcttgtttggcttgactaatcagctcttgattttctatcatttcaatcgccgtagccgcgatggcttttccagccaataacatcgcatcgtgggcatactccgttttcccttgagcaacagcttgccatgtatgaaacggcgtagcataagcccacgttgcagtcacgcactgtgcagtgggaacattccagctaacgtctgcgacatcagttgatcctgtcatgaaggaaacatttttagacataggagcaatttggttgaaaaccggatgatccgctaaagctctgtctagcagtgaacccacttgtttttttgctgcttctttatcttcggcggatgtagactcgtaaatagctttggcaaaagctatttcttcatgtttcacttcagccaaatttatttgcatcatttgcttatgcatcagctgctccattgtttgatttggaattagattagcgcaggctccttgaatttcctgttccatttgtgtttcagtcattaaagccgctccctttgcaattttcacaacccgttcataaagttcttttacttgagatggtttcggagcacgaattaagtacatcacttccgcttctgcttgaacaacattaggagagatgcctccgctatttgtaatcgcatagtgtacgcgcgcttcatctatcatatgttcacgcatataaatgctgaaaaaacaaacgttagtcgatttattttacaagcgaacacatgaattatttagtgaatacttatcgtgttatgacaccactttgctgtatcaaaaagcagctgagctaaacattgatacaaaaaagcatattctgatcgctctcattaccattcgttcacaagcggacctgcagctcttaaacttacaccttcatcgccttgtatctgacatcaaatcggttttcagctcaaaagcaccggtcgtatacggattcgataccaaagtaaccattgtatttacgcttgacccttatgaaaaacatcatgctattatcaaacaattagaagatttactctcaaaatggcgttactacaatgaatgtcatgtaaaaacagggattggaagtcggtattctcattttactcaaataggaaaaagttatagtgaagctgaaaaagctgtctcttacctgctgtctcagcagcaagatggatgcatgttgtatgaggaaataggaattaaccgactatttattaatcaatcaaaagaagaggtcaaaacctttattgatgaggtatttctccctcttaagaacaatcattcaaacgatgaacctttagagcaaacgctagaagcgtatttcgataataaccgctctgcttcacttacagctaagcagcttcatattcatgttaatacactctatcagcggttgaaaaaaattgaaggaaaaatgaacatatcatttacaaacagtgaacacctattaaaagttcagctagcatgctatttaaaaaaatttcattacagctaaaaaaccgattcttatttttaagaatcggttttttcagtagaaagaacagcctcaattgattgcttccagcggctcagtacctctttggaatcatgaagctgaaattgaattcctgatgttaaaactgcatattttgcgtaatcttctttaacagcggctacttctcccgtaaatagctcatagcctgataacacaggagcttctttttttagccaaaatttaatgtaataagcttttccttcaacaactaatgtaacggttgccctatgattctgtatcatgtttgttgaagaggttgtatctttccatactaacagcttgacgcgtgaagagctaatagctaccagctctcctgcgctaatcatggctacatgaggaaaaccctcggatgtcactgtagatagcagcattgcatcatgctgtttcctttctaagtcttttccatttaaaaatacgcgcacggcttttggcagctctgctttattcattttacttaccacctttgcttattaagatcgaggtggcacaggaggcacgtgcgttgccagcggtacgtcttttggattgactttaaatggtcgagggtatttttcaggattggtgatggtctcaggttcagaagaacgccaggtaaacaaacacacgttgcataagtaaatctcccaggctccttcaactggtgatttagatactaagttcgcttgtttggcttcacatcttggacaagtatgcatgtcgattcctccttgtttatttttgcatcatattcgttaagattttttcccatttttcagtttcaagtggtgtatctaaaggctgagaatagtggcctcttgtttccggtgcaactggtgttgtagcatccaaaatcattttatctgtaataccagccggctcagatcctggatcaagtggcagaactgaaagattaggcactgttataacatcgtgttttgggtgcatttttgttgatagcgcccacatgacttgcggtaaattaaacggatccacatcttcgtctactaaaataactagcttgcaatatcctaatccatgcggcgtagtcaatgccctcataccaaccgccttagcaaatcctccgtatcggcttttcgttgaaatgatagcaacgagaccatgagtatacatcgcattcacagcttcaatctcttcaggatatgcttcttttagctgctgatataaaggaacgcttgtattaattccaattaaataatctgtttctgtccaaggcataccgatatataaactttcaaaaataggatctttgcgatggtatacatgattgattttgataacaggcatgcttctgccgcctgagtaatgacctgtaaattcgccaaaaggaccttcatattcacgttcaccagctaaaatttctccctctaaaatcacttctgctccccaaggtacatctaaatcagaaagctgagacttcacaattctgtacggctcaccttgaatagctcctgccatttcatactcagattgatcgtaatgaagcggcgtagcggctgctgtaacaatcgcaggttcacatcctaaagcaattgatacagggaggttttcacctttttcttcggcttgttttaaatgaatggcaatatcatgctgtggcacgggctgaatgcctagacgatctttccctttgacctgcatacggtatatccctacattttgtttaccgaagttctccttatcatgctgatcacgagaaataacacacgctttatctagataatagcctccgtctccttgatttaagcgaaacaacggcaaaagatcgaataagttaatatcgtctgttatttcacactcatgaaacggcgctgtctcttctcttttcactttgacaggaaatttttcatatctccgagcaaactcaaagaactgttcttttacaggagtcgatttaggcagccccatcattaacgcgtgatttgaccaggaacccattacgtttagagctacctttgcattgtgatatccataaatattagtaaacaataatcccggcgtttgatctcctaaattactgatggcttgacctgctgaacccaaatcaggatcaggctgcacttcatcagtaatcgtcagcagctgcccttctttatgtagcgtatcaaggaaatctctaaagtctttataagccatttttattttcctccttgtgataaatgtttaattccttgccatctttttgcttcaggaagctcaattcccaactgatctaacgttcgaacagcaatatgtgtgacaatatcgtcgatcgtcttaggtttgttataaaaagccggcataggcggcaccaggatagctcccatttttgaaagatccagcatgttttctaaatgaatcgtatttaaaggcgtttcgcgaggaagtagcacaagtggctttctctcttttaacatcacatctgccgttctcgctattaagttatctgctagtcccattcgaatagatgctaatgttttcatactgcaaggactaacaatcattccatctatacgaaaagagccgctcgaaatttttgctgcttggtcttgatatgaataacaataatctgctagcgcttctacttgctgaacgctataggatgtttccagcttaattgtggcatgagcccaaggcgacatgactaaatgcgtttcaacagaagccttctttaacagctctaaaattcgaatacctaaaatagctcccgtggctcccgttattcctacagctattttcatttcccttcctcctctctgttctggttacacatttaactttacacttattttccatacaattaaaatattgataaagtatataataatacctttaaagtatggagttgaatacagtggaattaagacagttgcattattttattgtcatagctgaagaattaaatgtgaccaaagcggcgaagcgtctgcacatggctcagcctcctctaagcagacagctaaagcagctcgaaaatgagctaggccttttgctttttgaacgaaacaataacaagcgcttattgttaacggtagaaggagagctttttttaaaacgagcgaaagacattgtgcaaagggtcgaaaaatcagtattggaagtacaggaatgcaaaaacgtaacaaatgaaaagcttgaagtaggatgtacaatctactgtgcatcaaccgttctcgataagctaactcttattcaaaaacagtatccaaacagtacatttaatatctatgaaaacgaacctgctcatttaaacgaattattgacggaaggaaaaattgatgtagcggtcactactacagacttaccttatcaacatgtcaaaacaaaaacacttgcaccagatatctttgttgtagcggtgccgaaagaaagcggttatgcagaagaaaagatttcagtagccgaaattgcttctctccctcttattcttcttcgttcaaatcgagaaataagcatatacaatcgcattataaaagaatttgaaaagatggatatagcacctaatattttatgcgaatgccatgactcagctatgcttcttaatttagtatgtcgtggccttggtgctgctattgttccttattcgatgctatcttctttttcgctagaacatattaaaattttaaacatagaagacaatccatttgtaattgagcctttagttacgtggcgtaccgatagttatcttcccaaaatcgctcaagaatttttaaagcttttttaagtatagatacacaaaaaaaggctttgctaaaatagcaaagccttttttattttatattgatatatgtgactacattaaccaagaaattaatagcggtaatgtaacaagtgacataatggcactaagtacgaatgctgaagctgtttcaccagctaggctgtcaaagcgcactgaaatcattgctgctacagctgaacctgggaacgctactaataaaactaattttacgatgtcagctgatgatagacccattgctgttgcaattcctaacattacaagcggctgaatagccacttttaaaatcgcaataccaaatgctgctgggctaaattgaattttacggataccaattgttaccccaactgcgaatagcgccgcaccagatgtaattgaaccgatttggtctaagctgcttgatagtaaatctggagattggaacccacataatactaatactactgcgattaacggaacacaagctaatggttcagaaagaccatgtaagattgatttaatcgttactttaaataagctttcttcagaatctccttcacttctttcgcgttgtccaaccgtaccaataatagttgctaaaggatcaagcatcgcatttactacgatacccgtaatagcgattggaattgctactacatccgcgccaaacaagctacctaatacgggaatacccataaatgcaaacgttggctgcgtagagtttaaagagaacatagacgcgcctgttagtgagtatttgaatacatattttgcaacaagtaagaaaagaacataaaatccaataataccaagaactaatgctaataaaaacggccatttttcaataagcgtttgttttgatgttgttgtaataccaacgaatagatgtgcaggtaacgcaaattttgttacaagcgtatttaaccctttagatgttgttgcatcaaactttttaaaataccctgctaaataacctagcaaaataacaaaaaagattggggttaaaataataaagatttgactaatttccatttttgaacactccattgtttagattagaatcaatcatataaatttgctttcttagaaagataattattttctaaggcttgtctatggatattgtttacgtcaggccattcatctccccttttgctaaacatctctacaaatatgaagtaacgtataatggttcatgaaaacgcatggactttgtttttctgcaatcatttatttacttcgaaactgttcatttaatcaacatcaaatcacataaaacttgtcatacaatacagtaactctacaaccttagtaaaaacttgtcatacaatcatgttgttggcttactcaggctgaaaaaaaacaccttcaaatgaaagatgcttaatcttgtgacgaaagaaagcgacttctgattgatgaggaagaatctctaagagtttgaaactctcagttaaaaagttccataatttcacaaagtttttacaaactatcttacttatttgtatattgctttctgtgacgaatttatgaacatgttttaacttaacatttgtaggacaattattcaattacattgattaaaattttaatgaaaaaaatattttaatcctgctttttttacataaaacggattaaaatagtcacaaagacctatgtattatcggttaaaaagaagatgattcatctatcaccttcttttgctcactttatttaataatgacatttcgatcataacgttactttattttagcatcaataatggaaaaattgtgttcttctgaaaaccacgttttaattttttcttttgctttcagtttaacaccttcatcaatgtacatggcaacttgaatcaatgcaagccctagagctcctaaatcatctgtaaatcccactcctgctgcaaagtctggaattaaatctaaaggaagaataaaataacctaacgctcctataatgactgcttttgcttttgggggaatatcaggtttttgcagcgtgtagtataaaagcagtacggcataaacaacgtttgctcccgcttttttaccaaactttttaagcttgtcccaaaatttttcttccgaataatatttggctgtttcctctgtacgaacgggtacaatttcttgtttctcttccatatcgatcaccctttcattaccatatgtacttattataaacgattatctttacccaattccattgatagatgaaactccataaacctgcacaaagcaggtttatgaattttttaacgaatagtgcttcatgacgatggtaactaggtcattcagcgctgtttcacttttagaatgattttcaaactgctgaatgagatccatatgttcaagcagcacttcgtaattacccgtcatctttctgagaacttgatatgcggaactattcaaatccacttgtattttcaaatcatccagctgtgctaaatactcgttccagcgctggtcttgttctagcagcagccatacaatttcctttatcgccttccgcacattggactccatcttttcatctcctttgatacacagatataacaaagtctatgaaaaaaacaagctttctcattcccgtattaaacaaaaagagtttcttttattttataacaagcccgctgaagagctcttcccatactttatcatcgcgcagcacgtccattgaaaaaataggtgcatataagacacacgtgtaaggcaagtcccagttagcttcggacaaaagttctttttcactgtttgtcagcagcagtatatagaaatcgtttttgaccattcgctttaaaatatgctctaattctttcgcttcttcatacgttccacccatacgaataaacaatatacaagaactggtctccatcgacgttaaaaaccgctccgttctccgctcatacttttctttgacttcactgtacgaaagccagttatcttctgtattgatagacgacggaaaatcatgagcagaatcaatttgatacaccttatcacgcagtctaagggtggaaccgtctccgaaagaactaacataggttaaatgttcatataaaaataagtctttacagcggtttttcaacagctgattgacatgagaaagagaaatgctaatacaccaatcaatcacgccggcttgttttcgcaaagcatattttttcatgtatatccctggaaaacagttatagcctaaactgtatatcatatcgtactgcttgctttttagttcatttaaagtaaccatattcatcctcccttctactataaaatatgacagctttttatagaaagaggcggcttctgccttataccgtacaagctttttgtttctcaaaagcttgtgtaaataaagaacaataacataaaggaaaataatcgaagcaaaatattttggaactcgaaagattattgttaaaatacttgtattccattgaaataacaaggcctatgaagtctttaaagaaagaagatgaaattgatgagtaaagcattaaaagatattccgatttccgtactggatctttctcctgtagttgaaggaggaactgtatctgactcacttagaaatacattagatttagctcagcacgctgaaaaatgggggtataaccgctactggctagctgaacatcataatatgacaggtatcgcaagctccgctacatctgttgtaattggtcatgtagctgcaggcacgtcacgcattcgcgtaggctctggaggtattatgcttcctaaccattctccgcttgttattgctgagcattttggcacgcttgaatcactatttccaggacgtattgatttaggcttaggaagagcgccagggacggatcagctgacagcacaggcgctgcgacgcgaccgcagaagcgacggcagtgacttcccagaacagctaactgaactgcaagaatactttaaaccggcttcagaaagtcagatgcgcgttaaagctgttcccggtcaaggtttaaatattccgatttggctgcttggctcaagcggttttagcgcacagctttctgcacagctaggtttgccattttcatttgcaagtcacttttcacctaataatacaatgacagctctgaacatgtatcgccgttattttaagccgtccgacgtgttagacaaaccatatgcaatgttaggtgtaaacgtaatcgctgctgatacagatagagaagctgaacgtttggctacttctatgcagcagcagtttctaaatttaattcgaaacacaccgggtaaactaaaagctcctgtggataatatggatgaactatggactgactttgaaaaagcttctctccaacagcagctgggctcttctattgtcggaagtcctgagacgattaaagtcaagcttgaacagtttattgaagaaacagaagcagatgaactgatgattaacgctcaaatttacgatcacaaagctcgccttcgttcgtacgaaattgtttctcagctgttcaaataataaaaaggccggacacgtccggcctttttatttgctttctactgcttcaagaagtaaatctgcaagatgaacggcccttacactttcttctactccttctctaactacccctagcttcatttgaatgagacagcccgggtttgctgttacaatcgtatgtgcatgggcttctttcactttttccattttataatctaaaatttgcatagacatctcttgttccgttaagttataaataccagctgagccacagcaatgatccgcattttccatttcattaaacaccgttccgttaatcgcttggatcagttttctcggtgcgctggacgttttcatcacgtttcttaaatgacacgagtcttgatacgtaataatttgacttggaagcgataacttttgtttttccacaaactgctgctgcaataaaatctctgaaaaatctttgactttggcagaaaaagcagctgctctttctttccattcgggttcctcttttaataaatgatcgtattctaccaacagcgcaccgcagcctcctgcattaagaacaatatcatccgcttgaatggattcaaacgccataatattttgcttcgctaacttctttgcctgatctttttctcctccatgcgcatgcagtgcgccacagcacgtctgcacttctggtataacgaccttacaccccgctttttgtaaaagtgcaatcgtcgcgttgtttgtttccataaacatcgtatccattaaacaccctgtaaaaaaagcaaccgtacgctctcttgttccttctgcttcaaataaaaaaggacgtttcttcatttctttttttgttagcacaggcggaagcgttttttccatttgtgctaaattaccgggcaggacatttagtatatttgttttttgaacagctttttgcaagccgcttctttggtagaaagcaagcagagaatgtacattttttaatcgttctttatgcgggaaaagctgttcaaacaccatatgcctgagcgcttttactggccatttatgcctttttttctgctgaataatatcacgcgcttcttctaataagtgtccgtacttcacacccgaaggacaaacaggctcacacgctcggcagccaagacaaagattcaattgcttttcaacagcttcatcaggttcaataagtccgtctacaactcctttcatcaaagcaattcttccgcgcggtgacgctgcttcatattgattcgtttgtccatacgtcggacagcttggcaaacaaaaaccgcatctcatacaattcattaactcgtcataatctaaccgttctttgaacgcttgctgaatgtcttttgttgccgtcatgaacgaaccaccactctttttctcgtgtctttagcaaaaattttccctggattcataattccttgcgggtccaaagcatacttaattgctttcatcgcagctactccttctcctcccatcttcagcgctaaatacggtgctttcatttctccaactccgtgttcacctgtaatcgttcctccaagctcaatggctttatgaaaaatcgcttcaaaagcttgttcgacgcggtgaagctcttcttcgtcacgcgcatctgttaaacaagtcggatgcagatttccgtctcccgcatgaccaaacgtacagatcttaacgttatattttacagcaatttcattaatcgctttgaccatttcactaattttagaccgcgggacggttgcgtcttctaaaatggtcgttggcttcattcgcgctaaagcagaaagagctgatcttcttgctgtacttaacgcttctgcttctgcttgtgaagctgctacttttacagatacagcatttccttcgctgcagatacgggaaatcatttcaatatcgcgagtcactacttccggcggaccgtcttgttcaatcaataagacagcgtttacatctgttggtagcccaacttgcgcaaaatcttctactacttcacacgtcggctgatctaaaaattcaagcgtagctggaataatcttattggcgataatagctgaaaccgtcttagcggctgcgtccatgtcttcaaacagcgcgagcagagtttgttttgtttcaggtattggaatgagctttaaaatcgcttctgtcacgacgccaagcgttccctcagacccaacaaacaagttcgttaaatcgtagccagctacatctttagccagcttgcctcccgtcttaatacagtcaccgtttgcgagaactacttcaagaccaagaacgtaatcttttgttacgccgtattttaagcctcgtaaccctcctgaacattcattgatgttccctccgatggttgatattttcatagagcttggatcaggagggtaaaataaaccttttgcttctacggcgttaactaagtctaacgtgataacacctggctgcacggtagcggttaaattttcttcatcaatttccaaaattttattcattcggttaaatgtaagaacaattccgccttgcgttggacacgttcctgcgcttaaatttgtacctgaacctcttggcacaataggaacatgatcttcgttgcatatcgttaaaattcttttcacttgatctttgttttcaggcataataaccgcatcaggaagcgactgaaagttaggtgttgcgtcataagagtacacgagtcttgcttcactgctatcttgaaagttggctgatcctacaacttcaatgagctttgcttttgttcgttcattaagcataacgttcctccttatatatctcttaatcttattatagttgcagaagccacgagggactatggataaaaaactaaaaaaaagcgctttaaaaactcattttttgtatgtttatctaacgaagggcgcacttactctaatagagacagcgcaaggtaaaaaagcgtgataccctttacgctttttggatcaatgtctgttagttctttcatttgcttcaagcggtaatgaagcgtattaatatgaatatgtaaatcaaacgccgtttttttcaacgattgatcgttggctaaatagcatttcagcgtttcgagaagctctttttctttttgaatggaagaaagcactcgactcaagaattccttttttacaggttcagaaacgtcttctaaaatcatgtccatcagcagctcctcataaaaaacaacggtttgacgttttgaagccactttaagcgcttttttcgcttcttcatatgaagcatgcaaattaaattgctccgctggctttcctacaccaatagtgatcataacttggttgtttgcttgaatatactgctgacattttattaattcttctttaaatcctcgccttgccttttcacctacagcctctttaagtaaaagcaagcgatcgtatccccaatttgcaatataatctccttcagctttatgactttcaaaccagtagcgaatcatttcttgtacgtgctgctgcttctttttcgaaagagatgaatcaatttgaaacagcgtgcagcaataagagctgtctacttgtactcctaaaatatggcctcgttcaataaattctgcatctacttgctggctataaatccattcacgaaaaaaagcttctactcctttattttcccattcctttgtttctatgtagtatgcctcgcgaataattagctctgttaatcttcgaataatgtctgcaaaaggctcaacagcttctggcatacctgtaataccaataacgccaataatgtctccttgataactgataggcaaattaattcctggcttaactccttttaaatctgctgcttcttttttggagatatatagtttttcctttttttgcatcacgttccacgcgccttcatgaaaaaaaccaacccgcttttcttctgtagacgcaataataattccgcgtatatccgttacaattacatgttctttcatcacaagctgtacttcttttataattttcttcgacagttcagacactagctgcacgttgtttacacctcacctatcatcaattaaaagagctgaaagaatggttttctctcagccctctttttttattatgcgttcactttttcagctttttttagcacgttaaaaaactctttcataaatttaggtaaatccggccaagcttgcccggttactaggtttctgtctatatgaagcgtctgttctacaaatacagcacccgccgcttctacttccggtcggcaagcaggatacgctgtcacttctctgtcctgcagatactctctaaccgtcgttaacacgagctgaccatgacaaataacgcctaaaggtttattttcttttaaaaaatgcgcagcaatttcctgaacttttgtgttcattcgaatgtattcaggcgcccgtcctccaggaataataagtccatcataatcggcgggatccacttcatcgacagaagcgtgagaatcaattttatatcccattttctctgtgaatgtttccatctctggaaggaaatcatgaacaaccgtttgaagcttctttttcacgggagaagcaatggtacactgaataccttcttctaaacagcgataatacggataaaaaacttctaaagcttccacggcatctcctgttaaaattaagacacgtttactcatcttttatcaccttttccttcttaatgtcatcacttacttcttctcgcaagctgctttccattcctgcttttcccctatgaataataaaaaaagcagggccttcattccttatcaggaatgtcagccttgctttttatcttgtgatttttttaattcagctgttaattcactaaaccaagccttgtctttcgttaacagcgcaagatcaatcaatgaaagaatctgctcttcgtgcgccgttttttgaaggggcagcttctctattttttcatccatcatgccaatggttgtgccgaccattttttcatcatcactttttacaacgttgattagtgctgcttttttagatggatcaatcattttaatatatccgtatataagttcaccgttgcgagactttcctttgacccagtcgcctacttttaaatttccttcaaatagcttcacagtcattctcctttcttcataaacatgctaagaattaatgtaactgcagaaagtagtgtaatcataatacttacagtttagaaagtcaaagaatctgttttaaagcaaaaagcttgatatacagctaaatcactgcaacctatagacgaacaaaggagataaagattccttgtgaaaccgctgctgatttccgtgcaaggctccgctccaatcaaccgctaatacacctatatacatgaaatctatgttcaccacaaccataaaaaaatccgaacgattcatcgttcggatttttcttcaattaaattcagcctctttatttgttatacgagtccagttaagctgtagattccaatgattaagaaacatgcaagcgtttttataacagtgatggcaaaaatatctcggtaagactgcttgtgggttaacccggtaatagcaagcagagtaataacagctccgttatgaggaagcgtatccataccgcctgatgccatcgctacaactctgtgcataacttcaggaggaatgttgtactgattaatagcttctacatacttatctcccatcgcactaagcgcaattcccatacctccagaagcagagcctgtaataccggctaaaatgtttgtcgtaacggctccattgacaagcggatttgtaaaggtatgtgaaataccatcacgaacggctgcaaagccaggaagagatgaaatgacgcctccaaagccatactcagctcccgtgttcatcgcagcgagaagcgctccgccaatacttgcgttaagaccagcttggaaaccggtggtcactctcttccagtcatacgcaatcgttgtgataattccaataacaagtgccaactccactgaccaaataccaacaactgcggttaaatctactttcccgaacgcttcaaggccaattttggcaaaatcaaaaccgtctgggtaccattttggaatagaaacagtaaaaaatttgtttgccacccctacaagcacaagcggaacaaatgcaagaatctgtcttgctacgctaggttcatatttaggttctgtagaaggtacagactctttttctagctctgcagcagccgctagttcattattaaacccgtagtagccttctccagcttttcttgcttttttgcttcggctttctaaataccaaagacctaagctaaagacaataaccgatccgataatccccagtgtcggagcagcatagatgtctgttttaaaaaaagtcgttgggataacgttttgaatttgcggtgtacccggaagtgcatccatggtaaacgaaatagctcctaatgcaatcgttcccggtactaatcgttttggaatattcgcttcgcggaataagttagccgcaaacggataaactgcaaacgcaacaacgaataaacttacgccgctgtaggttaagattgctcccattaaaacaatagccaagatggcgcgtttagctcctactactttaacaattgttttcgcaatcgattcagcgactccagacatttctaccatcttcccgaagactgctcctaatagaaagacagggaagtagtttttaataaacccaaccattttctccataaaaacgtttgagaaaaacgggagtgcatagcttggttccgttaaaataacggctagcagcgcacaaagtggagcaaacaaaataactgaaaatccgcggtaagcaaccagcattaaaagccccagagatagcaaaataatcagcaaatccataacgtttcccctttcatccctcattcaatttgttttgaatttatcttattttttataaagtgcagacttaaactcatattcatagcacgtgtaatacagctggataatttcttctgccgtcggtacaacaggatggttagcaggacttccgctttgaatcgcatccgctgccattttctcaaccgccgcgtaaaacagctggcgatcaatgccccacgattgaagattaggaatctctaagtcgatacaaagctgcttgatggcttcaattaacacatctgctccctctttttttgtatatgatacgttcggaaaaagagcttgtcctatttcacctaaacgatcgattgaagcctcttttgtatagtccaaaaccgcaggcaggagcatcgcattagaaataccgtgcggcacatggaataacgcgccaataggtcttgacataccgtgcactagcgcaacagatgaatttgaaaacgccattcctgccagcatagatgcataggccatttcgtttcttgcttgaacattttctccatttctatacacaagacggatatttttcatgattaactcaattgcttgaagcgcaagtgaatctgtaaaaggatgtgcttttttagacaaatacgcttccactgcatgactgagtgcatcaattcctgtagctgccgttacatgtttcggacatgatagagttaataacggatcaacaatggctgtatcaggcaataattgaggtcttgcgagcatcattttcacatcgtacgccgtgtctgtaataaccgtcgctttcgtcacttctgagcctgttccagcagttgtaggcacggcaaccaaaggaagcggactatcttgaaaatcttgttgattttgaaaatacgttcgtagatgcccttcatttgtcatcataatggcaaccgcttttccagtatcgatacagctgcctccccctaaggcaataaccacatcgcactgctccgttttacatataacaagcgcttcatctagatgaatatctgtcggctctgaatttacgcctgtatacacagcacagtccatgccagtctctgctaagtaacgacggcaagtttctacattgcctgctttcaccataacgtcatcacttataagcaatgcctttgtcccaagcagtgcagcctgttctccaattttagaaaatgatccttctccatataaaaccgtgcgtggtacaagtagttcataaattcccactgtttttccccctttgttatctcgctgacaatctctccttccgtattttcatgctgacttatgtaagcgatttcatttgtttgcgcaaaaaaccaacatgaacttcgtttttctcccctatttattctctttttgtatacccctttcctctttcattctaaaatttcatcttatatttttcaatctttttttgtaactttttaaaaattacaaaaaaagccagaggtattctctgactttaccatttaaataaacttttgaacagtattatttcgatttaatttataaatagacagcaggaaaaaaacaagcgcaaaagctagtaaaatgctaatatttaaccataggctgcttaaatcagctccttgttgaacactttttaacgtacttaatacccacgtttgaggaagaaagtcggctattttctgcatcacatccggcataaattcaggcgggaaaaagcagccggacagtaaacaagttggcgtgatgataagcgtctgaagaccattcgctgcttttgaactttctgtaaaagcgataattacaagagacaagccgatggctactagaccaaacaaaactaaaatgaaaaacagctgccatacgggaatgttcatatctacgtgaaaaagagtcgtaatacaaacaagtgtaatcattacttgcagagttaataaaatcatatttgtaataacattggatatcacgtattgccttgcgctaactggcgaagctaacagtctaaaatacgttcgctgctctttttcttttgtgataagagccgataaattcaccgcagaaaaaagcataaacatgattaaatatccaattgtctgcttgacaatgttttgatcggttcctttgtcttcaagggcatgcgttgagacgtggaatggcgctttttgataattctcatacatttgtttaaaagccgcatcgtcgccttcagcagcttgattcagcgaagaaatattgtcaatatattgatacaaataagacttaataaagctcgttacttctgctccttttattgaagtgattgtaatatgatctggtttgttcgctttgacgctgtcagaaaaccctttttcaaaggtaataaccgcatcaactttctttgacgtaatctcatgatccacttctttgtcagtgagcattttaacatttgttttatgcagtccttttaaaaactgaacggtatcttttgtaatatccgttgagtcgtgattgacaactccgatattcaccgaagtccctcctgcatttccataaataagaacggacattaaaacccctgcaataggcaaaccaataacaagcacaagcgtccttttgtttctaagcagcatatttcttagcatatttgtgacaagccacatgatatttttcatgttataacccctctctttttctcaaaagcacaattgctatgcccaggaataaaatagagaagcctacgttcaacccgataactgaaagagaagcgcccatatcatttgtataaatcaatttaataagtccattattcatccaggttaaaggtgatacattgacgaatccctctccagatccattttgaaaataggttcctcccacaatacacgacacttgaataacaaccataataattgctcttgacgccgcttccgtcttcgtaaggtagctaactcctaatccaaagctaatggcaaaaagaatctgagatactaacattacgagtactaagagtaaatgatctccccagttggcatcaaaaaaatatttagtcgacataatgacgactaacacacaaatggagtgaaccaaaacagtgcctaaaatttttccgacaaaaatttcagcggttttaaccggcgcggctactaatcgactagctgtatttcgcatacgctctcctctaattaaataactcgctgagatagatccgtacaaaacaatcatagttgtcattgaaatggcgtagtagtctattgaatttggctgtttttgagaatgaagagatgtttcttgaatatagtcatgcttagacgcacggagcagattatccacttgctgagggtttactttggccacttccatagccacattgtacttatccacaaaagtgcttaacataccttggaccatgttgaattcaatgctgttttcttcatttccgtagagatgaatgtctccgtctttcacttctacataagctgtatagcgctgttcttttacttctttttttccatcctgattttttttcagcgctttaaagtgaatgcccgatttttctgcatgggcagcaaactgcttaaaagcagcagattcttcattacttgtgttgattttatagagaacataactgtcgtctatcttcatatcgttattaaaggcttgagacaaagctgttcctaaaataaggacgagagccagcggaaagagaatcataaagataaatgcacgcttatctcgcagatcacttttcatttctttcaaagcaattgcaataatattcattcgttattcctcctttcctttatatatctcttaaactgcgccctgtcagcgtaagaaagaccgtctctaaattaggggcttgttctttaactgctttaatttcgatatgatgcgtcattaaataatgaatgactttgttcaagttattcacttcggcgcttgaattaattttaatgattccatcttcatacgtaacggctgttacgcctggaatttcttttagaccgctgcaatctatatcgtccgcttcttttacttcaatccaaatatcttttgtatcagtgataatagctttcagctgctcttttgttccttcagcaataattttgccgtgatcaataatcgcaatctttgtacatacctcttctacttcttccatatagtgactcgtataaatgattgtgcttcccatttcatttagcttttttacagatgttaaaatataattccgggactgaggatcaatgccaaccgtcggttcatccataatgataagcttggggcgatgagcaattgcacatgcgatatttaaccttcttttcattcctcctgaaaagcttttcggatacgccttttgtttatctaaaagccctacaaacgctaaagcttcttcgactcgttcgttaagaagtgaccctcttaatccgtagagacctgcaaaaaacttcacattttcataggctgtcaaatcttcataaatcgctaagtcctgcggaacaattccaatgttcatctttgcgaaatttcggtgtttctttatatttttcccaagtacttcaatatcgccgctgttgctttgaagcagactagctaccatatgaatcgttgtgctttttcctgctccgtttgttcctaaaaagccgaatatatctccttcctctacttgtaaagacaaattatctaccgcaataaaatctccaaatttctttgttaacttttgaattgataatacgttcatcatttcacctctagtgtgttggtatatccttattttatgaaaaaaaggcaaacttacgtcagtgcataagttcaccttttctccatgagaaatctcattatttatgtatgaagtttctcacctatcggcagcagtgtggtaacagaaaacccgtttgccccgtcaacgatcaccgttccgttaatggaagccgctcgctcttccattcctgctatgccaaggcctttttgaaacaagtgagccccttttccattgtctttgacttctactttaaccattttatttagtacatgaagctcaatggcaatcatcgttgcttctgcatattttaatgcattcgtaatagcttccgttatattttcatggataattttccactgaagaggggtgataagatccaaattccctttgtatacaagaggcattgcaatactatgtttagcctcaaattcaccaataaataatttaagcctgctgattcctatttgctcagcgggaggctttatactttttaacgttaacctgatttcttcaatgccttctttcgaaattgtaattgcattttgaagaagagacagcgctttttcttcatcttgcttcattacatgctttgctgcctccatttgaataagcgctcctgtcattgaatgaccaatcttatcatgaatttcctgcgataatcgatttcgctcttctaattttgaagcatattgagactgtctcacatactctttattttcattcacgtgcttttgcagcttttgcatacttactctcatttcatcgagcttttgttcataattgattgtccgcttttgatagagagctgctcctgtataaataaagaaagtaaacgcagcgactaacacatacagtgcgctaatgtcagagggaacaagcagcattggaagcaaaacaaccagcagcaccatccattttttcacgactgattctccaataagctcacaaaggtttagcggcaaaagaagaaaaaacaaaggatgaagtttatacgcacaatatagaataaggacaattgaactaacaataaacatacgcttgaacgcgctctttttcacaatggacgctgcaatattaacacagctgtaaagaagcagtgctaacacaatagctgaaatcgagtggacataattagactgaatatacgtaatagccaaaaacagtataaggatgagcttagtcatcattaatccgacttccatagccctacttccctttaccggttaaatagtaaatagcaatttgagtgcgatgctcaagtcccgttttacttaaaatcgaactaatatagtttgctacggtaccttctgaaataaaaagtgttttagaaatttctttatttgaaagccccttggcaatcagcgtcataatgctcgtttcgcgctctgtaaactgtgtcatatccgcttttgactcgcgcttagttgcagcgtttaaacttgatttaatcttatctagcacaacatcttgaagaaccgtatgtccgttgaacacgcttttgattgcgtctcgaatgcgctctggttctgtattttttaacaagtagcctttagctccgttttttacggcatcaattatatattcatcgtcatcaaacgtagttaaaataagcggctttgctttcgttgactctgaaataagctttgtagcctctacaccgtccataacaggcattcttacatctaacaatgcaatatcgacagaatgattcttgcaatattgaacggcttcctgaccatcttttaaagtagcgacaacgttgaattcctcgtatgtatttagtataattttcattccttctcgaataaacgaattatcatctgcaataataatagtaattttcatttctgtaagtgagaacatctcactttttttcacatccttttttcacatccatccgcatgcttctcatttattgtatccataataaaccaaaagttcaatgcgatagttcgcagtctttctaagcactaaaaaagagcaaacctccgcaggtttactcttttatctcattacttctgagctaacttgatcactgtttctaaaagtacatttacacctttttcacattcttcccaaggagtgaactcttcttcacaatgactttttccgtttacgctcggaataaaaatcatagcggtcggaatatagctagctaaaaactgggcatcatgtccagctccgcttaccattcgcttgtaggaatacccaagcgaacgaaccgactcttccacttcatcgcaaaccgttttatcaaaccacacggtatcgcgaccccaaagcttggtcacccgcacttcgcagccttctaacaactccgcttgatcaggcagtaattgaataattttttccacagatgcaatgacatcttcatccgtatgtctcgcttcaagcgaaaaaataactttatttggaataacggtatgaatattaggcagtacattcatacggcccattgtatagactaaatttgaatctaatctgccgagctcatgacgagcttcagcaatcaggttattagttgcaaaaagcgcgtctttccgcatgtccatcggcgtcgtcccggcgtgatctgactcccccgtaacttcaatttcatagcataccattccgagcacgcactcgactacaccgatcgatttggcttctctttctaaaataggaccttgctcaatatgtaattccacaaatgccgatgcttcagtaagacggttactcgtatcgccttcatatccgcatgattgaagggcttgctcaaacgtcacgccgtcaacatccatcttcttcatcataacgtctttttgaaatttgcccgataaaatacctgaagccatcatggaaggctcaaaacgcgctccttcttcattcgtaaagttaacaatggtaatcggcaccttcggcttaatattatgttccaccagcgttcttactaactctaatcctgcaactacaccgaggattccatcaaaccttccgcctttttttacgctgtccatgtgtgagccaatcacaacaggcggcttatcttctactccttcaagcgtggcgtaaatacatccaagatcgtcgattttaatatccattccaagatcacggcagcatgaacaaaaatagtctcgtgctaagcggtcttcttctgacagcgctaagcgggttacaccattattaggtgttcgtccatactcggcaaatcgttcaagcgtattttttaacctttctccattcactgctactttttgtcgttgcaactcaaccactctcctcattatttggttataaagtgtgtctaagatgctgtgttaatgaatatcattcattatgacataaaataggcgatatcacttgaagcccgttagaactccttccattatttttataatgaaagtgcgcagtttgccttatgtatctattagcttcaaaacgtaaatttcctgcttttttctatgaataatgcacgtgttatttatgcatttttattataaaaataacgataggtttttttcaaaaaaaagagaattagttattatactaactctcctctacacacttactttttatttgctttcttcgcaatcgcaatcattgtagccaaaacaccgactgtaataatcacaatagcaattacagcagtggtaataataattcctgatgttacttctgaaacacccattagtctacgttctccttttgtgcctgacctatttacctacatcagcatactggtcggtttattcctattatatacgaacttgtaaagcgacgaaatatgtgacacataattgacatactgtttatatgttttcttttaattctacgttttatttaagaaaatacgggaataattcaaacatatataagaaatactctttatttctttaaagaagtattgtaatataaatgtaacaattgtaatattaacagcatgaatgttacatatattcaatgaatgagtaggagggaaatggaaatgaaaaaatttggaataatcttagcatcacttgctcttttcttttcactaagcacaggagttacagctcaagcagcatcacaaaatctatcaacgactaatgcggtaaaaattgcagcaaacgcaagcaaccatttctggaatgcacttcatggatctaaaggtaatttatgtactcaaaaaacatttaattataaaggcactcagtactcatatctttgtcaagattttaatacaaaaagcaaactagtaagctacttatctgaaacttttacaaacagtgctattcaaaaaggattaacaaattatcgctacatcacatataacggaaagcttgctcgtcctgtcggtgacggattcagcatgctagagtggaacaaagcaaaagcaaaactaacttatcaacgtgccgatgttcgctcttatcaatttacggttccaacagttgacggaggaagtgtaaaacgcaccgttacattttataaatctggttcacagtggaaagtaaataagtttgatgctgtactataagcaatataaaaaacaaggtcttctaaggccttgtttttttatgctctctcctcctctctttattaaagaagtttcactttattttcaccaactccccttatagtatggagacacactactacttattcgatacattgtcatcggaggattttatatgaacatactacaaaaaagaacggcttttatcgtaatggctgcttttcttttagcatttgttttcagtatcgtttcactatcacactataaaggagaagaacatttattttcgattcaagaaagtcatcagttaaaaaagattactagtggtatatctgctcctgataatcattctagggatcatcgtcttccttcagtaaacggtcctacttcacccagcaattccggagaacacgtaacgccttttcataatttatctatggataacggtgccggaagtcaaggagctaataaagactatgaaacgccgctagctctttatacggtgggcttttttatagcagcagctttcgtttacggattagtaaagaaaaagaaatggcatcattcgatagggcattctcgcgttattttatggtcattacttggcactggactatttatccggattgcgctgattccgtgggtaggctctcatatggatgcatctcttttcaaaaactgggcatcggttgcggctaatcatttttcaaatttctatgctaaaagcggaagcgattatccgccgttttatatttatatcttgcttatcgttgggaaagttggcagtttaccggattttcagcagtatttttcgctgttgattaaaatcccgcctattttagcggatgttgtcacatcttatttactctatcgtttagctcgtaaatacttggcaccttcttttgcatatctgttagcaatggggtatttatttaacccggccattttagttaattcaacgttttggggacaagtcgattcatttttcactttgcttattgtcctagcaattgtaatgattacggaaaaaagaatttatgcgtcggccgttatttttacagcagcggtcttaatgaagccgcaggcgattattatcctgcctattttgttgttcgagctcattcgcctgaagcaactgaagcatttcttcgggattgctttcactgctgctttcactgctggagtgattttattgcctttttcagcaggaaaaagtccaacgtggattattgatttattttcatccaccattggagagtacccgtatgcttctgttaacgcctataacttttttagtttaataggcgcaaactataaagacagctctgcaacgctgctgtttttcagctatcatacgtggggacttatttttatcgtcgcaacaactgttttttcatggcttatttatataaaagggcgcagctttaaatacgccgctcttgcagcgctgattcaaatttccggagtatttacgttttcttcaagcatgcatgaacgctacttatttccagcagcagctcttgctttgctcgcttatatttatttgaaagacaaaaacttgctttacttatcccttggatttagcatcagtatttttatgaacactttttttgttttatacggtgacagcaatatgcaaaacagtacgtcctatccgttttctatgtttgctacgtctatgctaaacgttttgcttgttgtttatttagtaaaagttgcttggaatttagtccaaaaaagtacggttttaaaaactgcataatacaaaaagctcagtgagtatgattgatcactgagcttttttacataacaagcgacatgcctggcgcgtcttcttctctttcttgaaaccctaattttttataaaaatgatgctttccttttgcagcaaacagctgaatcgattcaattccgctttcttggcatttcgtcaacagctcttgaataatttgctttccaagccctttgttttggtatgcgggatccaccatcacgtcgcaaataagcgcttggtaaattccgtctgaaatcatacggccaaatgcaattaattgttcattgtcgtaaataccgactctaaaccagctgttggctgcggcttcaaacagctgttcttttgtataatttccttttttacttttatgtaacccgctcgcttcatgcagagcagcaaactgctcaaatggcggaacctctttttttattacgtaggacacgttcattctcctctcaataccgttgctttctatattatatttatacatcaaaaagaataataattcaatatttttatctagttatcttgttaccctttctccaaataaaaaaactgccaaacggcagttttttaggcttgtactgatttttttcgttttttaaggttaatttctgcaatgataagtaaaatgactccaagaacaatcatgattttactcactgtttctagccactccggtgcgcttccagcaagtaaaatggcaaatccaatgatataaatcagaaaccccgcgagagccctaggggatttcaccttctttttcttcatatgtagggtctcctccttctttacagattctatgtagactgtatatgatgagtttatcagaaaaaattggaaacaacaaaggagacaaatgcatgtatacgttgcctcaaacgttttgtgatacgattactcaccttcactctcataaaggccaaaaatggttaactgactttcctcagcttattcgctactgtgaagagcgctggcgtatcaacattcacagtcacttgcctctttcttaccactttgttgcccctgcgcgcaaagcagatggtagcgaactagttgtcaaactctttgtagagccttcagagctgcttcatgagcaagaagcactgacagcactagctggtaagaacacgttaaaaatagtggacagcgatgctgaaaaaggcattttaatgcttgaaaagctgtctcccggatgcccgctttcctctttatcaactaaagaagaagctgcgttaatcgctgctaggcttatgaaatctctatggcgcgtgcctcactcggactccactatcgaaacagccgttaaaagagagaaacagcttcgagagtatacacaaatgtatccaagcggtattgattttctttcttctgaaacgcttcaacacgcactagccgttttctctgaattaaaccgcacttctcagcagctttttttgcttcacggcgacttgcatcatgataacatcttacagtctggtgaggcgtggaaaataattgatccaaaagggttaattggagaaaaagagtacgaaatcatcccttttcttttaaatcatctgcctaagataaatgtggcagagacaattgaccatcgaatcaatatatttgtaaaagaactgaacgtaagtaaaaaacgcattttactgtggggatacgctcattctgtgctagccacgtgctggttaatagaggaccgccaagacgccgcttctttttcacgtgctatagaagcatttcagcacttatttgagtactattacgggcataaaaaataagagccgacatttggctcttattttttgcatttctctgcgacaagctcatatgattttaatcggtcagccggatcgtgtgtaatagtgataagcatgagttcatccgctccgtagcgtgcttgaacttcttgaagacggacgtgtacttcttctgggtttccgataatcatggcttctttcatcttcttcatttttttctcttcttcttctgtcagcggatagctggccgcttctttaatagaaggcacaccttttgcttccattttatcctgctgaattttccatacgagtgagcttgttgcgatgcgatgggcttgctccgttgtttcagcgcaaatgaccgatacagtgacaatcgcatagggctgatcaccagtccgtcttggctgaaatgcctgtttgtactgatcaataatagctgaaccgtcttgttcactcataaactgtccaaacgtataggctattccgtttctagcggcgagctcggcactttttttacttgtgccaagcagccaaggttccggagagacaggcggcagcggcgaagctgaaagctttgcgtattcatgttcagccggaaatttatcgtctaaaaactgaagaagctctttaacaagttcaggcattttaaatacttgctgtaaaaaattatccgacagcgcatttgttgcttcagccgatccacccggcgcgcgcccaatccctaaatcaacacgccctggaaacagcgttgcgagcatgttatacgtttcagctactttatacggcttgtagtgaggcagcagcaccgctcccgatccaattcgaattctattagtctgtgcgccgatatagccaagcatcacttcaggagccgagcaggcaagtccagacaaatcatgatgctctgcaatccagtagcgctcatagccaagcttgtcacccgctttggccagctgcatcgatgcttctaacgcttccgccggggtctgatgggatgaaacgggcgattggtcgagtatacttactttcatcacgcatctgctccttattcgttcacttcaattaaacttaatgaaaaatcccctacctggcctttttcatataaatttgtaaaagacgtagagtattgatgaatcgttccttgaaaatcgagatcttcttccgggacatttacatgaaaagtacctttatataaaagtgtagtaatatcatgatattcctcacttgttactttaaaatcaactgaaacttttattttgccttttacaatttcttgttcatagctgtaaatttgaataggcgtatcatttaatacaatttcttgtaccacgttaaatcgtctccttttttagtgcgtatgaaaaataatagcacttgaagaagtcatgagcaaataaaagagcttctttttgctcatgcaaaaaaaagcatggctttttgccatgcttttagttcaaaaacaatcttatacgcgttttgtacgcgtgcgtttgaatacgaaataaagaacaataataacaaatgccgcaaccacaaacggaagcgtatatttgcttgctacgtcttcaatgttcgcccagttctcgcctagctttccgcctaagtaaataaataaaatcgaccaaggaatcatcgctaacacggttaaagacgtaaacttccaaaacggcattttagcaatacctgcaggaatcgaaattgcatgtcgaacaaccgggacaaaacgagcggagaaaacaacacccgcgccgtatttattaaaccagttttccgcaagatcaatatgcttatcatgaatgaataagtacttgccgtatttttgaagaaacggacgtcctccgtaggctccaatccaatataaaaaccactgtgcaatcgttccgccaataattccggcaatgactgctccaggaaaactaatcatgccttgagaaatcatataccctccgtaagctagtacaatttcacttggaatgatttcaatcattaagccgagcgcaatacctaaatagccaaggctcgttaaaaaatccaaaatactcgcaacaaatgaactcacctttaatcaccttactcattctttaataattttacactactactatattccaaccatcagtataaaagaaaactatgaactcactatgaacagcttacttccctgttgactgccggtaccttttccgcagctcatgcgtatgcagatccgctaggcggaccggaattggaagcttactttcttttgaaataaaatgcatcataagctgatatgacatgtccaaatcaatatagtttccgcacgacagaaaaataggctttacccctttggctgtccttactactctaccataaacttcgccatcaatcacaatatcttcataagcgccctctgtatcttcaggcataacgtaatcatgtcccttgatctttaaatagcttttcccaattccaacggtaggtttattgagaaaaaacgaagcatgtgtggctactcccatgtgctcgcagtgcaaatatccattgccatcaaataaaaacacgtcgggctctatttgaagttttttagctgcttcaagaattaaaggaagctctcgaaaagctaggaatccaggaagataaggaacggttacttctcctacactgtgcactttttctacaacgtttttcgtctgataatcaactactacaatgctgcaagctccgtaagatatgccgttttcttcccaatatgcaacatcaacaccagcacagttatgtatatgcgtcattttgacccgtgatgttaaatcaatttgtgcttttagcttttgctgaagcgtccggcactcctctttcgtttgcatcgtaaacgtatgtatgtactgaatatccatgttccattcctttcattgactgactcacctattatacaactattttctaagaaattcctattctttttttcacaccttttattatagcgctgtttccttaacgtttgattaaaatctctattcatttacgcattttttgtaaacatcaccatgaaaaaatccctatttttctttacgaaatgtcaacgctttctacacactttctctatatcagcatcacattttttcgttacgctatttctataccaacgcataggagagaaacgtgatgaaaaaatatttagctggtctaagcgcagtagccttgttatgctgttcgattgcctcttctgcttttgcacgcacggaagaaaaacttacgaacattgcccaccgaggagcctctgcttacgcacctgaaaatacaatggctgcttttcatcaagcactagaaatgaatgcagattacattgaacttgacgtgcaacaaagcaaagacggtgtactcgttattatgcacgaccgtaccgtagaccgaacgacaaacggaagcggacgcgttcgagagttaacgtacgctgagcttcagcgcttggatgcaggaagctggaaagaggattcttttgcgaatgaaaaaattccaactctttcacaagtgttagatgaatttcaagggaaaatcggtatattaatagagttaaaagccccggaactttatcctggaattgaaaaaaaagtagctattgaaatcaacaagcgaaagctcgatcacgttatcattcagtcttttaacgtttcatccatgaaaaaaatgcatgagcttctcccaaacgttcctataggcatattaacttcttcacagcgagatacaaacccaaactcaatccagcaattcgccgcttttgccacttactttaacccgtcctatgacatcctaacgcctgctctcatccaccaagtccattctgccggaatgaaaatatcgccgtggtctggaaccaagcggcttcccgcttcatttttgtggaaaacaaaaagtgacggagtgattacgaattatcccgatgaagtgaattgggtgcaaacatcaacaaaaatagggaaaaccattcacgcaagctccgcgagccacactgctcgcttaattggtgtaaaaaagtaatagcagctttctttaataaagagctcttataacccttctctcctgtataaatttgactttcgattattcaaatagtttaagatttcctttgaatttgccgaagacgataggtctatgtcaacaatcgcaaggtcctcattattaagagatttaaacacacagtgcccattaggattaataacttcactttcaccaaaatagacatagtcgtcttctaatccaactttattagcagctgcaataaaaatatgattttctaaagctcttgacctcaaataaacgtgctgatgatgctcgtaaggaatcatgttcgcacaaagaacaaagacgacttcggctccttttaatgctagaattcgcgccacttcaggaaattccatatcatatgtaatcattactccaaactttccttgaggtgtatcaaagactggtatactatctccagaagtaaaatataaattttcatgatcaaaaaggtgaattttacgataagttcctactatctcacctttcttattaataaatacagcggaattatatattttaaagtggtgtctttccggaaaaccaagaataactcctatttgtaattctttagcatattttttaactttcgtgattaattctccttctactgattcagctaattcctccacctgttcatttaacaaaaaaccagtcaaaaataattcagggaataacacaaaatccgcaccttgatctttagccgcttccatcgttccaaaaactctctttaaatttttatctttatcatgcaaattgcttctaagctgggctaatgcaatttttaattgacgcatcccttcacctctttaaaaaccttcttttttgtacacttttaatttttttgaaatagtagactgatcaacctgcaatacttctgctactttgtaagtactgttgtattcaccgtaagcttttaaaattaattctttttctacttgtcttttagcttctttcaaagacattggtgctttaggagaaaatgaccaacctttttcacgtatatttttttcttctagaacttctttttcagtcatatttgtgacgacaattctttctatcgtgttttccaattcccttatgttcccaggccatttatattggataagctcttgttttacttcatcattaatttcttttcgaagatgatattttgtattatatttaaaaagaaaatgatcaattaagatatgtatgtccttttctcgctctctaagaggtggaatcgtgagcggtacgacattaagcctatagaacaaatcttcacgaaataatttttcctcaacaagctcctgtagatttttatttgttgcagcaattactcgcacatctactttcttttcctctgtacttcctacttttcgcaccgcgttttcttgcaaaacacctagcagttttgcttgtaggtttaaaggaaattccgcaatttcatctagaaaaattgttcctttatgagcagcctcaaataagccgacctttcctcctttttttccgcctgtaaaagttccttcttcatacccaaatagctctgattcgattaaactctctggaatagcaccacaattaacagaaataaaaggctgcgttgaacgtgtactagtactatgaataaatttagcaatttgacttttgcctactcccgattcacctagtagaagaacagtggagcctacatgagcaattgtttttataattttactaattcgtttcatagcagatgattccataatcaactcatcggttttatgctgatcttcattcgaataaggattaaacatgctttgagatatattcgttaatgtcacgatttgatttatgtaagagttcgcttggacaaggtgaagagtaaacagaaaggttcttccctcataggtacttaataactgagtagagtcacttggagcagcagtaaagacctttttccactgaacttcttcaaataacatattttcttgaaacagcgataagtgactggtttgtttattattgatagatacggtaccaatgcgtccttcatgatttatgatgactactattgattcgcaggtacctattgaagaattcctcattatccatttcctcctttcgattgtttctaatgaaaaatcgcatcattgatgataaaaatcatcatcttaactttccaaataactatataagcagaatatgacttattttctttttatccctattagtataatgaaaaaattcatctttttaaagattaaaaatcagaattgactgaaaaaacacgttggcacacttcttgcttgtatttatagtgaaaacgattatgaggaggtattttacagtgaatattacaattgctcagttttgtcctgtactaggcaataaaaaagaaaacattcgaaaaataaatgactgtatcaagcaagctgcaagcgaacaggctgaccttgttgtctttccggaactttgtttgacaggttattttatttgggatgatattaaggagctagctgaatccgtcagtggtgaaagcttacagcttttccaacaaagctgcagggatcacagcatccacgccgttatatcttttcctgaagtaacaattaacgggcattattatattacatcagctcttatagatgataccggaactgtaattggtacgtatcaaaaaacacatctttttgacagggaagctgaaatcttccgcccaggcaacactttacctgttttcaaaaccaaattcggaaacattggattaatgatctgctatgaccttgaattccctgaagtggcccgaactttaaaaataaaaggagcggatttactcatcatccctcttgctaacatgagcccttacgaagattatcaaataacgtatttaaaaagccgtgctatggaaaatgaacttccaattgccctatgcaaccgaataggctctgaagaagatacattcttttttggacatagcgcagtcgtcaacagtaaaggaaaagttcttctaaaaatgggtagcaaggaacaaatatcgacagtagctatttctttagaggaatcaaaagatcagaagcttaattaccttatgcacagaagagcggatttgtacaaatagatataggaagattaaaaacaatttttaagggaggcgcaaagatggaaacaaaaagaaaccaagcagttccaactttgaagttgtcacatattgttttgtttggacttgcttatatgacaccaatgattgtatttggtatttacggcttgttggctgaaaccacccatggactagtttccactgcttatatagtggctttagctgctatgctatttaccgcttatagctacggtaaaatgactaaagcttttcctattgcagggtctgcttatacgtatacaagaaaatccataaatccatatgtcggatttatgattggatgggctgttttactagactacctgtttcttcctatggttatttggcttatcggagctgtttatttacatacagctttccctaacattcctctttggacatttgtactagcctttatttttattacaactgttatcaatataattggcttaaaagcagcggcgagcgtcaatacattaatgatgatttttcaattgctcgtagtcggtatttttatttcactaagcattatatatcttataaaaggctcatcaccttttgcactctttagctttaacccattcttgaacgagcatcttacattttcgtttgtagccgctggcgcttccattgcttgttattcttttttaggatttgatgctgttacaactctatctgaagaaaccattaatcctgaaaaaacaatgccaaaagctatctttcttattacactaattggaggcatcatttttattggagcttcttattttctacagcttgttcatcctgactatacatcttttaaaaatattgattcagcagcatttgaaattgccgtacagatcggcggcaatttatttagctctatttttctagctggattaattattgctcaattcgcatctggcttatctgctcaaacaagcggagcccgtttattatttgcaatgggaagagacggcgtacttcccgctaagatatttgggtatcttcatcgaaaatcaaaaacacccctaatgaatattttattcataggaggcatttcattgctggctgttaagcttgatgtaagtacatctacttcatttattaactttggagcatttttaacgtttatttttgtaaatctatcggtcatttttcactattacttcacgttaaaaaatgaaagaaagaatcgttttcttctgtactttcttataccggctatcggagcagcccttgatttctatctctttattaatcttgataaacacgccttagtgctaggaagcgtctggactgccataggacttgtgtacttaacttttcttacaaaaggatttaagctttctcctccagaaatggatttcgatgaagaggaaataacgaaaccttcctctcttgtacatcaaaaagctgctgaaaagacattgtaactttttaaaaaaagggatgctatttatagcatctctttctcatgtcggtcttgaatactcgaactgaactatccaacgcttctttccttcctcacagctcaaataaactttctccgtccttatttatccaatacttttctgtttctggaatcaaagctgtaaagtcttcatacgttcctttccaatcacttggaacatattcttcaaatgaagccggctcaggaaacagtgaatagaacaccttttgatcacagtccaccaaaaacgaagggataaagtctaatacgtcttcttcctctccgctttctattttatcttcaaacagctttaaaagagtagctgcatctgctttatatgactgtatacgctttaaaaaaagctcagcattttcaccgctgagaatctccattccttttcgttcaggttcaatgtattcgtcaaccgctaaatcaccttcattttcaaaagcttgcgcaaacttcacataatctaaataccatagctctcggtcagtcacataccattgaaactgctttttatgtatcactccgacaattacgttttcagcatatataggttctagcatgagatggacctccttgcttttattagctttgtgacctgttatatacgatttaattaatctttaagcactctcttttgtactttttcattcagcttttgctttaagtatttagcaatttctatttgtccaaattccttagcatatcggtacgcatccattttcttaatattctcactggtatattgaatggaaatatctataccttgattaactagatatccaactacttttttatgaccaccgtaaattgctgcaaataaaggatttctttttgccaagcttacatctagttctgctccagattggattaagtactgtactatttctacatgcccctcacctgctgcgactcgtaagggagaagcatcaaatatatcaccttttgtatttacatcgattcctttatgcactagatactctactatttccatctgtcctttttttgctgctatatgcaaccagctaccaaatggagtcatggtgtgtagaatttctgcattactacctattaattctttgactgagttaatgtcaccacgtttaattgcatttcttattgctttattgacgctgtttttctccaaatcatatcccccttaatgtagttgcccattattgccgtgttttaatatagacatctccctcaataatttagctgtttctaccgtttttatttttaaatagttgtggtcaattaaaattactgtcgtatttgtagttctcttaacacttttgttcgcaaatcattcactgtttttctattcgtatcatcatttaataaagaagttaatctttctatgtaactacctgcattctctatacatctttcaaaaccatttataaaatgctctactaatgtatcatcaactaaagcaatgggttcggggtaatattcgacgccttctctttcaaatgcttttctactagtaaaggcaactgcatcaataatacagtcccaggctataacatctgttttattatctgacgtctcttgaattattgtgataccattttcctcgtgatctaataattcataaagagtatctccactattttctttgtcttttaaccattcccagcatttacatataacttcctgagctaaaatttgatcttccgtacgagaaagtacaggcacaactttttctgaaagccccagaaaaaatatgactttatcatgctctgttaaactattgaaattagcattagtcattcttaaactccgtttccatttccctcaatatgatgagcttaacgcctccgtccatatatcttttgcccttctatgattaggaaagaaatttttttatgatctttttatcatattcatcttctgaaataatccctaagtacttatactcccaaatcacctgttgttcatacgggtcaacagtaagaatatcttcatacccgtagtctatctcaaatttcccatcatgacctaaatgcaaatttaaacttgtccatatctcctgcttgttttctataaatacatctaacaactcacgaaagcactctaactgtttatctaataacactaagtagctctgttctgacacctcaaatagttcaggtatatcatgactatatataggttcatcgcttccttttggataataaaagaaatacgttgtttgagaaccttctcctacttctgcatacaaatagatgtctcgccagtcttcttgtatcatttcctttaaattatcggccaccttttgataaatattattaagctttaattccatttactgtccaccttctgctttaaatattcagcaatttctatttgtcctcgttcaatcgcaaattcataggcatccatatttttcatcgtatcccctgtatacgttacagtaatatcaataccactctgaacaaggtattttacaatatcaagatgaccgccataaatcgctgaaaataaaggatttctactcgaatcgcttacatctaatactgcacctctatcgtataagtactgaactatgctaaattcacctacactcgctgcatgtgcaattggcgctgactttggtacaccttcatttgtgttaatatccatcccgtattcaactaagaactttatcatatcaaggctaccagctctagcagccacgtgtagccacgttccaaaaggagttataaactcaagcagccttttatctgtaatcagaatctcttttgcttgttctgtatcaccgttcttaattaaatcataagttttaactgctctttccttattatccatagaaacctcctaagatatttttgttcatacggattcttcaccagtttatagtatcagagagatccctttagtcttctgaaacctcttccagaattcatctaatgatttaaataggattatttggatactcttttaaatagtgctctattaaactcttactctatttcagcatattggttcacagccctcttcctatgcattaaaatcaaaaatcctcaatagcctgctctactgagggttttactcttcacttaaactgtatttttctctatttaaattaactctataataagtttaaagtatttatcatcttcctgaaaaaagattttataatcttcaatttgataagccttgtacaaatacgcttttgctttttcaaactctccaagctcacaaaaactttcccctaaccgcaacaacagaaaaggattttcatttccggccggacacttcaaggcatattccaagctgcgtatagcatcttcgtagttttttattaaaaagtatgtatcacctaaagttccgtaaatccacgtagccgctgaccatttttcctttggctctggaactaattcaagtgctcgttgataagaagcaatcgcttcactcatttgtttcagttcagcaaatcgatcaccttcttcacataacttgacaattcgctggtgaagttgatcgttcatttccattacagcatctccctactgaaataataaggtttcatcttcatgatccttttagcagctttatatatttgacatcttgcccttcgaacgatcttccttctgactttttattggcaatatcaaaaaattcttttgcaacatttaattcgcccaactcataataaatagttcctgataaaaattcacgctctccgtcatctattctttcaaaatccgatgtatataaatgatttaaccattgcttagcgcttttgtaattctttatcactgtaaatgtatcaataatatcccgtacaatattgtaagtgtcaggatataaacctttaggctgtggaatttcaccccaagcttgtaccaataaatctatagatgtttcgtaatcattatttccaaagcattcatcgcttttggtcttatatttctccattctcacttgcttttcagggtcaatttgtatcatttcttcctccactcaaaatatcttcatctctttcatttaatactgccttcacttgatctctttcaaaaatcaccatatattcatatggtaacgctaaaacttgaataagggatggacgaatctttaataattgataaacataaaaagcctcaagctcttctgtatcatcttcttcatgtaccggccctatgtaccagccagaatctcctcgttcagctccgccgcttctttgtaagtaaatgctatctacttctagtatatttttagctaccacgactttatctctaaagctgacaccttcaccatttttcatgtttaacttgcgcaaaaagtgaacttgttccaactgcgcccatagagaaagcgttaaatcttctgtataatcctcaaagggattccctgaatagtccggtgaaagaatgtaatactcttcattctttacagaaacaataaagttcgaccaccctatttgtatcgaaaacccgtcagtccatttttctctttctatcgtttcaaagatacgaaatagactctcaacctgcatttttaattcatgttctgcttgaactacgactactttatcccctatatttctaatgaattttttcaattattcttccctttctttttccactaattttgttaccaaatggattgcgtttggacagtacgtatggtttctttctatagcttatacccataaaaatacttttgtcctttttcccagcttttaatggaaagattgtaaatatactccatcatttttttataatagcttgcattcataattgtgcggtaatctccaggcactttttccccagttaaaatggataataaagatggaatcaactccatttttaatggttcttcgttatgtgctgcactcatcgctctttggactaatttttttgttaagtctccgggaaaagctacattttgttgaaagtaataactttctggatcattctcattgcaatactcaacataatagtctcctatttcctcggcagtcgcctcttctccgattttcgcttcatagtcaaggaaaaaatcaagcgaatcctttatgataatagccgtatcgtcaatttcattccagtcttcaagtaaagccaataaatacggaactacttcaagagaaagtgatgttgtcgctgcggatgcaaacgtatcaaccgtttcttcggtacttttactcaaaaatcgcagattatttgaatctcttaagtcgtcatgtgttgcgatagcgaaaaagacccttatacacaaattcaaaaccgcttcatcttgagtcccgttcatcaattgaattaatagcggcttttgagtaaaatcccctattttatataactcgattaaattaaataaaatgtccctttctgtatggcttttcaatagatgttcttttatttcagcttgagataaagtggtcttttcaccaaaccatatactattcataaggtttcttgagcctaccatcattacacctgctttcgctaagtaaattatctatttcaactttctctttaaatattcagcaatttctatttgtcctcgttcaatcgcaaatgcataagcatccatctctttcatattttcaccagagtatgtaatcgatatattaatatgattctcaactaacagtttaaccatctcaaaatgaccgttatatatagcagcaaacagcggatttttatctggttcactgatatcaattttaatattatggttaataagatacttagcaatatctatatgtccttttgcagccgctctttctaaggcattggtagaaaaagttcctccttgtgcattaacatctattccagcacgaataaggtattgtacaatttctaaatgaccatgagctgtcgctacatgtagccatgtgccaaaaggtgtaacccatgttaacatttctggctctttctcaagtaagtctctcaccttatttaagtgaccaccttttatagcacctctaatagcttttgtcatttgagttatttccatttttcgttttccctctactttctactttgtagaattctctccaaaatatatcgtctctctgcttggtgtaatgcgctgtagtgtggggagcttattgtctatagcaagactcgattcgttgcttcttcatatactcctactagtcttcattactatgattttgtttgattttatgtaaaagagccatcactttttctttatcatgggcatgatcttccatatatacgtggcaaattttgtgcaagtaagttaaaaacgtttcataatcgacaataacacttttgtcagtgtcacccgtaccgtctagaaattcaatgccgttttccacatagccctcttcccacggctctaagtctcctgaaaatgtacaagtgtagtactcatttccataaccagtttcctctgaaaaatagtgtaagacttttaaaaatttttgatctgataaagcgctataaaaacttatcatgggagacaacgtacaatctatatcatgaaataattctacgattttctgcattcgtatcacccttttataattaattgaatcaacatttactatttgaccgtgaccactacgcaaacgctagggttatctcttgaacctctataatctaaacacacaaaatctcctgcaaataaaataaagattggtaataaatatttatttctacacttataaaaagtcctcttgatgtaatttttccagggttaatttagtaccttcatgatgtgggaatttaaccacaaatactggatttatgctaaattggattattgggatactcatttaaatacttattgattaaagtcttactttcgctatcatctggttctgttcctaaatatttatattcccaaatcactagctggtcatcaaagctgtaatccgtgtcaaaccaatttgtataatcataatgcaccttcaatttgccatcgctattaacagatagtgtaaaagagtaccaaagttcttgctgattatctttaaaaacgtttcttaatctattacttaactcaaataaagctcgatccttcattttataaaattctttatcaatatcgtattcataaggaatttctaaactatatttatagttcttttcattctcaagggtattataaaaaaagcaagttcctcctcccgtttcggatatttgagcgtaaaaataaatctttgtccattgtgtaggaatcatttcattcactgtttcagaaatttctctataaaattgatttatttctgtttccatactcaatatgttcgaccacctaactgtttttccgttttataaagtgttctctgtaccacacagtaatgtttctctataactattataaaccactacaataaactcctcattactcttaatataagacactaaagtactaaatgcgttctctccacttcctacattgcgttttttacacttcaaatactaactttttactccaacataaaaaagaattcgactgttttcgaattcttttcctaatttaacaacttctctcctcatttttttgctcttaagcaatttgtaccacctgcatgagagacaatctaaacccaatcaatttccagtcatcctttgctttaaatattcagcaatctcagtctgcccaaactcctttgcatattcataggcattcatatttttgatgttttctcccgtgtatctaatggacacatctattcctttttgtactaaatatttaactacttcttgatgccccccataaattgctccaaacagcggatttctcttcgctaagctcacatctagttctgctccagattctattaaatactttactctctctaaattgccagatccagctgctagatttaacgcagaagcatcaaatgtcccgcctttcgcattaacatcaattcctttttcaactaaataccggacgatttgaaggttctcctttttaaccgctacatgtaaccacgtaccaaatacagtcacggtattcaaagtctctatatcatcacctattagttttttcactgcattgatatcgccagttttaatggcatttcttatcgctttcttactatggtttcggtccactatgcaaactccttcatttgaatcttcattgtcagttaacctctcaccaatttgcgcaataataacttcaacatcgtaccaaccatttatatgatccgattcgttatcttcaagaacacataaaaaccgttcaataatacaatcactctcgtcatggctaaattcatttgaaattggaacaaccccattatttttttataaattcatgatatgattttggaaatgaaattcttaagcttttttcaacggtatttaatagttcatcatttggtaaaggtaaaacaatgctattactatctactttcctattttttcactacttgttactttctttctctacgcttatatacttattcaaatcctataaccatccattcatctactacatcccaaaagtttagattatactctggctcttcttttgaagaccacaaagtggcgttgtcacccaaactgtttttataatccactactacataagttcccattccattactgaaaaatccatatgaagatgcgaagtcaatttttaaattacgttctccaatttcttcaataatgtcccattcataatcgtctaaatatgtgatatcttctagggactctaaccccattgacttacttggatagtagtaaaacccactatgaacattttcataaaagcttctaattttatctggaattttactccaatcttcttcaagctgttcgttattaaagtactctttaggatttcggccttcataatataaaattttccctctggcatttttcaccgaatataatatcgaataccgatcaccaatagccattaattcaacatctatcaaaaatccctttaaaaaagatatggtgttgctcatttcattacttacatatcttttccatatatttaataccctacttatcttactagatttatttttctcttttaaaatttctctccattcatcaggaattaaatccttttggatataatcaatgtcattagactctattaagcttacagatagttcttcacttaatgtatatttatttaagaaattcaacttatcttgaagcatcatttctacccactccctattcttctaaaatctagctattaagccctgtattttcactttgtgtttactgcttccttcatttgtatagccttaataattatttaaataggattctttggatattcttttaaatattgatctattaaacttttagttttttcatccgctggtgcttcatctaaatatttatactttcaaatctttttctgtgctacaaatccgtaatctgtattcaaccaatctgtataatcaaatgatacagagaacttccctgtttgatctaacattagcgtaaaagaataccatagctcctggctattttctttaaagatttctctaagctgttcactaagatcaaaaaacttatcttctttattattaaattctagttccgatggattaaattgtttcggtatatctagactatacgtgtagctattatctctaattgatttataaaaaatgtaaactcgcccccccggattcatcaatctgtgcataaaaataaaatctttcccattcttctggaatcatattattaaccgtttctgctatttcttgatacaattcctgtaactgaatttccatttgcataaaatttatcctcccgcctgatttttaattgttactctctctaattcttcaccttcaatttgatactatattctaaatttaatagggcgtattgaatgccatttttaacagaaaaatatttttaccgatacttttttagaaaagcttccttcaaagcatttgcccaacctttatctttctccataataaaccaaattctattagaacgattgttatctattttacctgcactaatgttgttcctcaacatgtcgcgtctggttatgtattctgtcaagccatttatggtaacaatatcgtagaggcctttttcgttttgctccaggactttgaaggatttggcggatttgtaggcgtctaaggagtgatccgctgcgcttaggcctttagctatttaattgaaacaaataaaaatgaagactctttgaaattatatatcctcagataaaagaaagtacttgctggctgttatagaccatcaagtgctttatagttagctatatagaataagttgtaagtttcttgtgtgctccatgtaacgaataatttcgaaatttaaaattccatccggcctagtaagtgtatctgtttttcccacaaaatattgttacacaattccacagccatacaacctccatgagctaagtgtttactcttaacccttagtcatgtaacttatcaagaaattcagtaaatgttgttgcaacataaaatacattctctcttgcacgctcttccgcctgctcttccgttaaaccctctttctcgattaacatttctttctcccaagcattttcatgttcccaaaaaaccacaatcggattatcttcatgatctttataatcaaagcatattaagtttccagacggatcgaaagcaaaagggattaactttttcggaagtgtatcctgataatcattaaagacttctagaatatgctcatcatcttcaacgtcatatgttaataatgttccaaataccttttcttttccttcaacttgaaataattcaggactaacatgggcaccattataatccatagcaacctctatataatctaagggaaatttcactcctaatttttctccaacattctccacttcattcttagtgactggttcgtcccatgatctccaatttatattactcatctgataccatctctccataatttatttccacctaaatgatttactttgtgcgttttagataccacaagttgcatcttaccaggtacctgatgatggtgccatgttaatcctttgattctagcttcaccattttcaatatctcgaagttgttttaatgtaaatatgtctctagatatttcctcgtgtccaatcgcttcttttaacagctctgtacattctttaaattgtctatcatcagttactttgaacagactctcttttatagctatatacataaaatgtcatccggcccatttccctttcttttctcattattcgcatattaaaataagactccatgatggcatatatcaccttcgtgaagtctctattctcaaacgtattcttgttctgtttgtccaactcaaatattttaattacctttttattcaattgctttatccgcttataaataaaacttctcgtataacacttatgcactggagaacgctttaaatacgttacctttcctctttgcacaaatgaatgtactggccaaattcaggaaatgcatcccaatttccttcaagggtatcgttagtctcgcgctcctcgactgagccgttctttaaatcccgcttttccattgctatatagccatcttctctgaaacccaaaatcaagctacttacttctgtatcagtttcatcatcgtactcccaatatatggctgttcttaaaaaaatcttaccctcactcataacttcaaaatcataatttaaatatttacgaattaggtcatcataaaaccctaccgaaacccattcatttgtaacatttatagtatacttaggtttctcatcttccattaatactgccgtatatggttcatgtttttgatgattcgtgtatgcagtacgatcatcaagaatattccaaggcttctttttgatgtcggaccattcgtcacaataataaatttccatagtcaattatacaccttccctttaatatccctaatcacaatccggttttttgttgcttcgtcaagaattgtttgcggaattgttttattttgaactggtacttctaatattaattcacctttaagccgccctcctttgagagcattaggattaaaagtactatttgatattttggatcctgaagaatattttttggtaatttcatttaagtagctcttagctgtcttttcttgcacttcgctaagttgagtaaattttctcgatactatttccttgttaggtgcgtatgagtcaactacgtactttttgcctcctacttcttttgcctccaactctacttcattataagggtaacgaggacgattttccttattaaaattattacctgcttgccaacgatctttcagccaatctggtagagatttctttttgggtgtaacttcactagtaaccttagaaacagccgaaactttctcagctttctgcataacataattttttgagttctgcaacgtctctcgaaccgttctttggcccaagtctgggcctagaggcgctaattctggcatgagtctcggcatatttgaatctagaatattgttatacgttttctttaaggattgagtccacgatggagagcttttttgaacgctttggtacgcactgcgggctctgttcgtaataacttcagtacgaagtgaattacgcatatcactaagcttcttcgctccgtttgccacggcattagcgcctgctttcgctgttttccccgctaccttcgtagaaagcgccccagctccagcaattcctaatgcttgcagaagacttgctttacgctgctcttcactgattttattcccgaacatgtcgcgtccggtcatatattctcctagcccgtttgcagccacaagaccgtagaggcctttttcggtttgctccaggactttgaaggatttggcggatttataggcgtctaaggcgtgatccgctgcgcttaggcctttagccgttttgtagatggcttttccgccttttgcggctcttcctacccagccgacaaccggaatgaagccggctgctgccatggctcctgctgcgacgcgctgtgaggtggaaagtttttcacccgtaacagggtccacgccttctgctgctcgtttataatcataatatccgctgacctctcctgtaaaggtagaaaccgcgtcccacgttttttcataccacggcttgtttgcttcttcttcttgctttttttccagctcgtatacttcttcttgctgcttgttgtagtcaacatatgaagttgcatagtcgtttagctttgtttgaactttatacagctcgctgtcgtgataggctttttcgtcaaaggcaagctgatagacacttcctccttgactcgtagcaagctctaagccgcttactagcatatccactaccgcatagaagtcgtccatttcgctgtattcttttgaccattcagcgtctagctggttcattgcttcaattgtatcggtgcgttttttctctgcttcttctattttatcgttaaactcactcgttgaaaacgctgaaatagagacgatatcgtcaatgccgtttaaaatactctgcagatcgtcgtgctgctgcgcaaccatttctttagcattgctgttggcgttttttagctctgtttctaaaaatgattcatctacaatcgtgcttcctgatagctttgctttttcagctttaacgtgaagcgttgaaaaatagctttgctgcattttaattaagttttcccactgtccggccgtatcggcgtgctgcttataaaaagattttatattgtcagcgccttttccttctaagctgccttctaagtccgctacgccctgcagcgcttttttcagttcacccagctggctgagtaactcatcgtaggctttttccctgtcttttgctacatcaaacagcgcttttgcatcgtatacctttcccacagtcatccccctttgctgctacgaatggataatagattcgtcttgttcttttagtaagtctacattagattttgtatcttttacgtttttgtttagtgcttttatataagtagaaataagcgtttgaatttcttcttcgcgcgcttcccatttctctgtagtatcaaggctgttttttccaaggtcaggcattttgctaatggataaatttccaatcgctgtgctgactgcttcaagctttttgataacgtcagcgtgatcaagcttaattgtcatgaaaacagcccccttctaatttcactaatcttgttttctactgcgtcgtaagcttcttcacctttagctaataaagaatccgcttctccaatagcggcgttcaagccgctcaaagctcctttttcagcttctagcgcccatatctttgtttcaatttcacgaatgtatccatcgtaatcaccgtctaaaatgccttttatgttgtcgtaggctgccgtacgtttttcgtcaaaatcatccgataacgtacccgtccatttgtctcccagctcaggctttttgatgtgttcaatttcttttaatgaaacagcttgttcatgctcaattttacttttagctgttcttagcttagagatctttccttctacatctgagactcttccagatacttctcccagcagtccgtctaatacgcttcctaaccccatatcgttcctcctgttccgcacatttcgagtttaatccaataattataagtataaaatttgtctcattatagctaaataggaaaaaactctcttttttatgcttctagtttcatgaattgagataaaaatgaaaaataagagaaaaaagactcatgtctaaatacgttatccaaccatatactgttatctaaaacaaagaataagtagaataaaaccattcctttgtacccatacccgtttttttccacaaattaaagctttttgcgtaaaaagaccaacttcacttcgtttttttacacagcaaaaaacctctgcacattctgcagaggttttgttttatacttgaaccggcgttggttcttcagctgtttgttcgtgctgcacaagtccgtagttttcccatgcccggcttttccagcggaaaaacataataactgcgcgcgtccattcatcggctgcgatggcaagccaaatgccagcgagccccatgtctaaatggaaaacgaagaaataaccaagcggcaagctcatcatgaccatcgacatcgcaccaattaacaccggatatttggcatctcccgctgcccgcagcgagttaatcagcacaatgttcatcgttcttcccgtttcaagcacaatgctcagaagcagcaccgtcgccccaagctcaatgatatgcggattgtctgtaaacacgctgatcagctgtgttctgaatgtcatcacaagaacaaccatcatcatcgttacggcactggcccatttgacgcttttccatacgcgatggtacgcctcatctttttcgtttccgcctactaaacggccgacaataatcgctgtacccattccaattgcaatggcaaataagtaaatgaacattgaaatattcatcgcgtactgtctcgcagcaagtgattctgctcctaggtaggttgcatagtataaaaagacaatttgacagccttgatacataacctgttcaaaagccgacggaataccgatttttaaaattttgccgatatattcttttgaaagcgtaatgtagtactgaaatttcactctatattccatcacttgatacagcagccaaaagaacacaatcagcgcaacaaatcggctgaaggcggatgaaatcgctgctccttgcacgcccatttccggaaagccgaacttcccaaagattaaagcatagtttcctgcaatatgaaaaatgttcattccaagtgaaacaaacatcgcctgcttcgtaaagccgtgtacgcgaataatcgctgcaagagagttaataatcgcttgaagaaaaatagctcctccgacgatggataaatagctttgtgcatacatcagcacgtcaccttgtaagttcatcgcttccatcatatgccttgaaaacaaaagaaaacccgcgctaataactagcccgactcctaaatttaacgtaacggccaaagcagaaatctttgacgcttccatataccgttttgatcctaaatactgagagacaacaattgccgctccgttaccaatgacctctaacaccaaaatcgcaatgtgaaggtattgattggctgctccgactcctgatacggcatcatccgacagcgcacttagcataaaggtatcagcaatccccattaacataaaaagaaacacttctaaaaagatcggccacgttaagaaaaacaaattcagcttttcttttggccctttttttgtttcgaccgcggtcatcccatcaccttctttaccgatatccaatttcaaacaagaagtatcttaccacacatttcctttgtatacatcccctttttagcacattttttattttatttgtttaggcataaaaaaagccgcttccctgaaggaagcagcttttttccgttattaaattgaaattttcacttccgcgttcatacctggaagaactttatctgatgcatcatcaattgaaattttcaccggtactttttgcgttacttttgtgtagtttcctgtattttgagccggaagcatagaagacactgagttggttgcgcggccgattgcttcaacatggcctttaaagactttacctgaatctccgtccactgtaatgtcaacgctgtctccttcttcaatatcacctaggtctgtttctttaatgtttgccgtaatatagattttagataaatcagctgtttgtgctaatacatcgccagcttttactaattgattttgagatgcgttgtttttaataattgttccgtcaatcatagaagttacgtctgttgatttgtcgccttcttttaagcttccaacagaatcaccttgaaaaacactgtctccttcttttacattccattcgcttaactgaccgttagctgaagcaatgacttgcgaaagcggtgcttctacctgcgcttcatctgttttaacgtaatttgctttttcgtagaaataatatccaccaaagcctactagtaataaaatcacaatgattccaacaatgttagtaaccaataaacgacttttactcatcggaattccttctttctatagttagtatattatatagatgtttcttctgtttgaggtgccggcagcatttttctttcttcttgcggctcagcttcttcttgaacctcttctttttgaacaagaattctatttttaccgctccacgctttacttagtgaagcaatgagcatgattacgcctaaaataccaagcaagaaaaataagttgtgatacgcatgtaaaatcgatgcttttttagcgcctgctacaacagccgtcacagccgatgtttttgcgtctgcttgactcattcccatacccatatagcgtttaatcatttcagacagctgcagcttcacctgaggatctactgagctaatttgtcctcggaaatcttcataataaatcgcgttttgtcgaacaacaaaccatcctattacaggtgctataatggctcctagtaaatttcgaatggagtgcagtgaaatcgaacgcatcgaagcttgatgtaaatctccggctagtgccgctcctagtgcaccggataccagtgccatactaacacccataccaaagagcataatgtgaacatacaagctcactagtgatgtatcggctgatacgtttacccagctaaatcctacaatgacaatgagaagtgatccaatcgctccaaggtagcctggaccaaatttatcatacaaaaatgtcgtcgcaaatgctgaaatcagtaccccaacaaaaaagtataaataaaaataagaaagcgtggtgtacgatgcattttgcacattttgcatgacgccattaatacctgcgattgctaagatgtatgccatatgaccgccaattgccataattgtacctgcaactggttttacggctagaagcgattttaatggtactaacggattttcagccgctaaatcaactaaaacaaaaatgacaactaaccctgctgtagctagtaagaatggccacacttgaatagaagcgaatccttcatatcttagttcatacagtggatatactagtaaaatcataataagactaaggataaagatacttttcttatctactggacgctcttcttgctgacttggatcgtgagcaggcaataccttatatccgataaacagacagacaagagaagcaagtattcctagaacaaacacccagcgccaattgtccatgctaagagatacagcgcctaaaaaggctccaattgctgttgaaccgaagagtccgccgatcgctaacactaaaaagaagtttcggattttattcggaaacgaaatcagcgcagctggaataatggttaaaaacaacattcctgagcttaagccttgaatcagacgaccaagggataaaaatgccacattttcagaaaaaacgttgataatcgaacctgctaaaaagactaaaacgaacgttaagtatgctttacgcacgccatattttttcgtcagcatcggaccaattggtaccccaagtccaaatgccaaattagaaataatagatggcaatagtaagctttgtgtactcgcatcaaatcgattttgaatcaatacttgattgaccgtgtaagataaattcaaaaaatactgagggccaatcgaaaatagcgttaaaatcgccataattaagtatttaggtacgcttaaaccttgtttgtcggaggctactgctggattattctgactcatatttattcctccttttattaaattcttttcatatgactaacaattctttacatattttatcgtacaagttgtatcatgcaagttatagcagcactacatattatacatcttttaatgaagaaatcaacttctttgttccaacttaaaaagactatttttcaatagcctttttgtttacctatatgtattcgctttaacatccattgctgcgccattttttaaaattatgattcaagcgggataagcttttttccagtactaaaatctcttcttccgaccaatcttctaacacttcagcataggcctgtttacgcttgctttgtacatgctgcaaaatatcttttcctgaatccgtcatttcaattaaactaattcgcccgttttctggacttggaaagcggcgaacaaactgtttggtttcaagcgcagatacttgccggctagctgtagataagctcagctttaaattttcagctaatgcattaatcccgagcggactgcgctgatctagctcgcttaacagtaaatattcagaacggtccaagcttccaagcttgggactgtgcgtcgttgttagacgaacaagcagcgcaatttcgtgctcaatggtttgcagcgagtctcgcttcacctctgtctccccctttatctcctagaacattctgtacttttcgatatgtttactataccgcaaccgttcgcgtgaaccaaccttttttccgtttttcttctattatatagaaagaaatcataggtggggtacatttaattctaacatcacgggacagtggtcgcttcccattacatgcggatgaatagcagcttcttgaatcacgtctttgactctctctgatacgataaaataatcaatgcgccatccgatatttcgttctcgcactttgttcatatacgaccaccaggtataggctccttcttcatttggatatagatagcggaatgtatcaagaaatccgctagcaagaagcgtcgtcattttcgctctctcttctatggtaaaaccagaatttcctcggtttgactttggattgcgcaagtcaatttctgcgtgggctacatttaggtctccgcataaaatcactgctttacggctatttaatttgtttaagtacacgagcagagcatcttcccattgaagcctttcttcaagccttgctaagtctcttttagaatttggcgtatacacatttactacatagcattgttcaaactcgagcgtaataatacgtccttcgtcttctgattctttatccacaccgtatgaaacggataaaggcttttgctttgtaaaaactgccgttccggaatagccttttttcacggcataattccagtactgataatatccttctagctgcaaatcaatttgaccttcctgcagcttcgtctcttgaatacaaaatacatccgcattcacttcttgaaaataatctaaaaatccttttcgcacacacgcgcgaatgccatttacgttccacgaaatcaacttcataaactgtccacgttctcctcactcgatttatgtatcagtgtttagtgtagacaatttcttgcatgagttcaaataatttaaagcgtatacttttcttttcaaggtattcctgatatttcttcttattttattttctgtacctcaaacactagatacaagaggtgaaacataatgtcaacaaacaacacgtatgaaaataacgaagaagtttctgttgtttctaaaaaagaagagcaccctactaaagaatgcgaaacacagaatcaaacggcgcttactaaagaagatttttctttaaatgattctgccattaagcactttagcaggtaattcataaaaataaaaacccgttaactggtagcaagacttgttgtacaaagctcttgctatccatttcttaaaaacaaggtgatcatatgctaaaaaccattcaaatgatagaagccataaaaaaacattctatgccttttgctgatgtcgatgacttactgccgctcattaacacagcaagccgcgctcaatacgtacttctcggagaagcatctcacggcacatctgaattttacgaaattcgagcagctattacgaaagaattaattcatcatcatgatttctcctttatagccgtggaaggagactggccttcgtgttttgaagttaatcgctatattaaaggatatacaactcagtacgcgaatgccgaagatgtcttaaaatcttttaaccgctggccctcatggatgtgggctaatcaagaaataaaagaattgattgaatggcttcgtgattataacaacaacttgccagcacatcagccgaaagtaggtttttacggcttagatgtatatagcctgtgggaatcgatggaagctattattgagtacttagaaaacaaccacgcttctgatgcaaagaaagcgaaaaaagcctttgaatgctttgaaccttttcatcgcgaagcacagatgtacggaatctcttctgctctttacggaaaaaactgcatggtagaaatcttagagcttttacaaaccattcagcaaaaaaaagatacctatactcatgagcctgaggctgcgcttagtatgcaggtaaatgcgctggtagcaagcaatgctgaagcttattatcatacgatgattaccaacgacaatgaatcgtggaatattcgcgatcgtcatatggtagaagctttaaaatatattcaagcttactacaaagaaagcgctaaaggcattgtatgggagcataacactcacatcggagatgcaagagcaacggacatgaaaagcagcggcatggtgaatgtaggtcagcttacccgtgaagaatacggaccgaagcatgtttacgccgtcggattcggaactcatcacggcacggtcattgcttctgatagctggggtaatcctcagcaggagttaaccgttcctccagctatagaaggaagctgggaagataccattcaccgagcaggtgcttttgatcaatatctcatgtttacagaggaaaaccgaaatttttttcattcaacgataggccaccgcgccattggtgttgtatatgacccagagattgaacaatacggaaattatgttccttctcgcttgtcaaaacgatatgatgcttttatttatgtagaagaaacacatgctttatcgccactcatcttttaattaaataagcggacttccaacgaagtccgcttgttttttattgtaaaaagctacgaatcgtatcggtcaccagtgcatgatcttcttcttgtgacattcctgatacggtgatgcttccaattacgccgacgtttttaaccgaaatcggaaatgaaccacctaccgcttcgaattcgtgagggttcgctgcataaaactgcgcgtaagaacgatcttttaactcgcagtacagcttcatataatatgagctgtgatggtggcgaaaaacggtatttgattttcgtttaatccattcttcatgatccggaatcgccccttccatcgcatgatgaaaaagtgtttgaccatttcgtttaatatttactgtaacggattttctcttactttttgcttcattaataattgctgttcctatctgtaacgcctggtcatttgtaaattgatgaaagattagttctttttcctgttgaactactttttcaagcagcgtctctaccgaatgattactcactgtttctcgctccttagttaaaataaaccgctcgtttttctttgctgctttcaaaggccgcttcaatgactttaaccacgtcacgagcttcttctgctgaaaccgggagctcttctcctcgaagcaggctgtcggcaattttttgataatacgtcacataagaaccgtgcagcgtttgaatttctttcgtttcgccttcgccagttgtcagctttccgtagtgctcagggctgtcggctccccacgtatcatccacaggcttcttgccggctcttagcatatcttcttgaccgtcaatgccgtatttaatatagcttgcttttgttccgtgaacttgaaagcgcggcccgttgcttggcacaatggcacttgaatgtaaaataacgcgaagagaaccgtacccaagcactatgtggaagtaatcatccgtacgtgcatgatctcgctgaccaaatacatcagcttgaacaaattcaggcattccaaaaagatgtaaggcttggtcaattaaatgagatcccaaatcgtaaagcgctcctgatccagatccttcattttctctccagcggtctcgaacagctggacgatagcgatcaaaatgagcttcatacattttaacgtcgcctaatttcccttcttcaatcagctgctttaccgtcaaataatcattatcccatctgcggttatgatagacgcttagttgaacatcctgttcttttgctaattgaattaattcatttgcttctttttccgatacgaccatcggcttttcaacaattacatgcttgcctgcgcgtagtgcgtctttcaccatttcatagtgcatgccgctaggcgttgtaataataactaaatcaatgctgtcatcttctagaagttcagatagagtgcccactacttcaacatcctctaagtcactctttactttttcaggatttgaactcattacctttgaaatatgaaattcgtctaacacgcttaaaagcggcgtgtgaaacactgttgctgaaaatccgtatcctactaatcctacttttatttttttcattgtgtttcctctcctttatcaacatctgttacgataagccgcacttgattttgttctattttttcttttacatccgcttctggtgctttatttgtaattaggatatcaatatcgctcatatcacatactcgatgtaaaaattcacgttcaaacttcgtatgatccgcaagcataataacttgtcttgcacattgaatcatctgtctttttaaaaacgcttcttcttcacttggagatgtaataccatctgcaccaacgccgcacgtacctaaaaacagctgatctactttgtattcctgcaacgtagaaatcgtccttggcccggtgacgttacggtttttcccgttaaacttgcccggcagcaaaaacgtatcacacgtcgtatattgatcgagcaaatccacattatcaatggaattcgtaataacagttgcatgctttacatccatatacttcgccatcagtgcgatggtagaagacgtatctaaaagtacatcatagcccgccgaaattaacgaagctgcttctttagcgatttgttctttcgctttggtaggcgttcgttcactataatcaacgatgtgacttgacgatagcgtcgccccgcctttgactctcataacctcaccatgttcttcaagtttgactaaatcacgcctcgccgtatcttttgaaacggtaaacatatcgcaaatttcgtctaacgtaatcgtacggtgtgtatgaaggtattcaacaatcgcactcatgcgctgctcttgatacatccgaataccctccttttttactttgatatgagctaattgtagcgcaaataaaaaataaaatccataaaaaaacttaaaaacattaagttttttacgtttttaaattaaattataaaagtaaacaaacgccttctggaaataactatcttattttggataatacttcttttatatctgataccctttcatgcttttgactaatctcttctaaacaattcagacttctagcaaatgtatatgaaaaaaaagcgagaatcgtaaagattcccgctttttcgttacattttatgctcaagcgctttgaagttttcttgaaattgctccaagcgaacaagtccttcttcacgcagacgtttgttttcttcttcgatcgcttttgtttcctgcattcctttcataataatattccacgtttgctccatcgtttctacttttacgctaggagcaccggacattttggcaattttaacgctttgctgtgaaatattttctgcatttcgaatgagcagttcatttgtacgtttgtctaattcgttcatcgactcggctactaaattttgacgctttgctgcgattgcgttaataagtccatttttaaaaataggaatcgttgtaataaacgcagaattgattttgccgatcagctttgtatttcctcgctgcagcatgcgaatttgaggagcagattgataagatacttgttttgccatttctaaatcatataatcgctgctccatcagctcaaccgcattttttaaggtttgaagctccattgccgccagctgatttccactcgacgctctttcttcaagcacctttagctcttgttttaactcttctactttcacttcccccgctacaatgtatttttcaagctccatataatactgatagttttgctcgtaaagctgttcaagtgttgtggttgagtgcttcatttcggtttcatattttgtaatttcaacatatactttatcaatttcagagcccatcgtctcatatttttgaaacagcttgtctactattttttgaccgcgtttaaaaagcttagagaaaaaccctttatcttcaacaaaatcctttgcatcaaatttatccataatctttccaagctgctttaataattgacttgattcttccatgctagacgatttaattgtactaagcacttttccggaaaaagaggaaatttcattagctgtttctttcccatactcaagtaaagccagctgatttttataatcaatttgttctgccaagcgacgtacttctggctcttctcgcagttttgcttttacttcgttaggctttgtttctaaaacttcttcagcttcatttacatctaaaggctgtaattcgtttggtgccatttaaaaacccttctttctttaaaagattcgttttaaccatttttgaatgagcgacggctctttgaattcttcattaaagctaatatcttctagccagtgcatatcgaaatatttttcttcgacaaacgcttctatatctatttgaccggtcggattaaaaagaacaatatcaacgccaaattcatttaacagaagcagtaaagctgcatcttcacgcgtaaacgtttcatgttcatttccgtgataaataatgagccgagggacgtgctgcgtataatcaaatttttgaagcatgcgaagcacgttgtttggaagcttcaaagactgattaaacaagtacatttgacgctgatacgcatcttcatgatctaaccgaagaagctttgaatgtgcacagtatctggaaatggctgcagctagcccttgctgaagcccgataggcagttctttatagcgccaccagttgctttcaatcattttatctggactgagcgtcccatcacttccgagagctccttgataatgaaagtgattatttccttctatttttttgacaaaaggaacagaatcaatcgtcagagctaactcattttctgtttgcatgagctcatgcactttgctccagtactcttttcggtttttagaaataccaagtacttttgagaataggaccggcacgtgtacatatggcttggacacttcaaagttaggacgaataaacgcccgttctctcattaataaaaagatctcatcatacgtcgttttgagagtaactgaagttggaaaatacgaacgaaattgccaaggtttatacagcagggactcctctgaatgaagcacttgctcaatttcttgagaagctcgaaatgctaccgtaccttttcgaaccggtttatccgttggaaaaggaaaaagcgagctagtagaaggaaacgtataaaccgttgttaaatgttgattctcatctacttcttttaaattatcctttccctccggatgaaaggtaaggacgtcaaaacctagtaaaattaaataatagagaaaatactgctcgcttttattcgcatctccataccacatgatgcgaggcgcgtgctcaggaaatgctttatcgaccatccaaggttttacatgattccactgccactttattaaatcgattaatacgcgttgaaaatgcccgtccataaagccctctgcgtgttgttctttaaaacacgttaaggttttaataaatttttcgcgtactcttctatgtatagcgggattttctgacttcacgatcagcttttttccttctaaaaaagcaaacagccgattgacagaaaggccgcgctcttcttggttaattttaagaattgtttgcacttcttttaatctatcatttgaaatggacttatcaagcttatcgtgcaggacaaggatcgatgatgatgaatgtgcaagttcataaagaaaggctgcgtactcgtccgcatcaagatgggtgcctacatatcttcccgccacttgtttataggaagtttgctgctcattttgtataaagtcacctcgcagagaaacatcttgagaaaaaagagaagttccatcctgctcgttaagattaatgatatgaggatcaattagtttactcacgccttacagctcctttcttttcagacatatacatgctaaaaagaaagggtactcgttaaagcaccctttctttttcatttatcccatgccttttttatacggataatccgtagttgcggcaaagatcggccaagccaccggaaaatccgctgccaatggcattaaacttccagtcgtttccgtgcttgtatagctcacacaccacaacagctgtttcgattgaaaaatcttcgcctaagtcgtaacgaagcacttcttcgtttgtttcagcgtctatcagacgaacaaacgcgttggatacttgtccaaagttttgtccgcgagcatctgcgtcgtgaatcgtgacgctgattccgattttttcaacgtggtcaggaagaagggaaaaatcaacggctatttgctcatcgtctccatctcctacacccgtacggttgtcaccggtatgctccacagcaccattgggactttttaaattgttgtaaaaaacaaactcctcgtcatttacaacctgacttgatttattggctaaaaatgcacatgcatctaaatcgaaatcctgagatccagcatatttgtttgtatcccatccaaggcctactattacttttgttaatcctgggttggttttcgttaggtcaatacgctgaccttttgataaagaaattgacataaaaacatcctccgtacgttttcttgctttaatgattaggcgtttaaaccaaagtcgttgacaagtgccgctaagccgccttgatagccgctgccaatagcattaaacttccattctccgccgtgtcggtacagctctcctactacaacggctgtttcgatcgagaagtcttcacctaaatcataacgaattaactcttcgtcatttgttgcatttaaaatacgaacgtaggcattgcttacttggccaaagttttgaccgcgcgcttccgcttcatgaatcgtaatggtaaacgcgatacgttcaatagattgaggcacatttttcaagtctacttgaacctgctcatcgtctccttcacctacgcctgtacggttatctccggtatgctcaactgctccgtttgcacccgtcgtattattgtaaaaaataaaatcagattctgaagcgcattttccctcttggtttaataaaaagacagatgaatctaaatcaaaatcgtttccaccgtcatacttatttacatcccatccaagacctactactacgtttgttaatcctggattcgtttttgttaaatctactttttgtccttttgaaagattaatagccatttcgtttccctcttttcaagctgtttattttgtatatttatttgcaatttctcctaatccagtatctctcgttgcatctccagttgctgaaaacttccattcgttcccgtctcggtaaatttcacctgcaaatagagcggttgctcctgaatggtcttcagatagattaaagtagacaagctcttcgtttttagcgctgtctacaacgcgaataaacgcatttttaatcataccgaaatcttggtttcgctcaacacactgatagatgttgaccacaaacacaagtttatgtacgtttccaggaaccttttttaaatcaacaaaaatttgttcatcgtctccttcacctgctccggtaaggttatcgcctgaatgcttaacgctcccgcagttactgtgacgatttccaaaatacacaacggctgagttacttacaagcttatcgtttgaatttagcataagaacagatgcatcacagtcgatacttggtccgtttcctccgaaaccaaaaaagctgcgtttttttacaggatcccatcctaatccaactgtaatagaagataggccttctcttccttttgttaaatcaattttttgacctttttgtagattaatagccacttttatttactcctttactgtaacgaacatattctatttcaggttctatatagctctatatcatagcgcagataaatgaaaaaatagtgaaatttttataccacttttaacgtttacgtaaatcttctttccatggaaagaataccacaatctggtgattgtttcaaaaattaagcggtttgttaggggggtaaattaattgatttaaagtttgaaagtgaagataatctactaaaaaagactgtctctaaaccggaaatccgagttatgagacagtcttttttggcttattgagctattttcaaagtaggttcttgctgttcagctgttttagcagctgccacgttttgaatacggccttcagctttgtattcaaacgggctgttgagtgttttaatatagtttaccgttgcttgtaaatcttctggtcccacttccatatctgaagaaagtgcaccaataccgtatttttcatttccgtacatatagttattcactactaccgtgtattctttttctttgtcaattttacttccatctggaagcgtaatatcgactactttattcgtacttccatcccacgtatagttaaatcctgcaatatgaaaatctagtccggatgatgtaatttgattgtttaacaccgtttctaaatccgctccgcttagctttactttatttaagacgttgccaaacggctgaatcgcaaacaaatcaccgtatgttatgtcacctgcatcaagctgtgaacgaacgcctccgccattcattaaagcaaagtcagcgttcatttctgctttcatgccgtcagcaattaagtttccaagcgcgatatcccctgttgctccgttagaaggatagccttttgccaaatctgtagatgacttcccaaccacttctgctttaataggcgctgctaaatcttcgtactttttcataatgcttgaaacttcaggatctggcgtatagtctttttgatatacggtcacaatttttgcatcttttttcacgatgtcacccgtattatcgatttcaacgtctacgtcagaaaacgctgagccgtatgaataagcttgaacgattaatttgttatctactactttgttgttgtatacgtgattgtgagctgaaaagataacgtcaacttcatcgtcaacttttttagcgatatctgctgcatcaaattcagtaggagttccgttttgattagatggattatgagcaagtaccacaattgctttgataccttgctttttcagctcttccgtatacttatcaatcgctgctgcttcgtccgtaatttttaagttttcatttcctttacgaacaatcatgcttggcgtttcttgtgttacaacgccgatgaagccgattttcttgccgcctacttcttttattgcataaggttctgtaattaatttatcagttgacgtatcataagcatttgccgctactaccgggaaattcatgccgtcgtatccttttgttccttttggatggtctccgccttcaatcatacggtgaagctcagcaatgccttcatcaaactcatgatttccaagcgtacctacatcaaatccaagtgattccatcacttcaaccgttggctcgtcttgaaacagcgctgaaactaacgggcttccgccaatcatatctccagcatgaactaaaagcgtattcggattttcagcttcttgtttacgaatagctgctgctgtatatttcatatttccagctaaaagcgcttggccatttgaattgatttttgtatctgtatcgagctgaccgtgcaggtcgttcatgcctaaaagctgaacctttgtattatcttttgattcgccgtttaaattaattttgtaaatgccgaatcctttgtcatccgttttatttgtatacgtaatgttgcttccttcagttaaatagctttctccgcgcggtgagcttgtgaacgtcacgttagccgttccgttaattggtgcaatggaccagttatcgtcagctgttggtgtaatttctttttgctcggtgatgtagtccattagaatttgacggttttcatccgctgaatccaccacaagctcgcttccttttagaccagggaagtttccgcctccgccagctcggtagttatttgtcacaacgataaactcttggttcggatcaaccggcttgccgttatacgttaagttaacaacacggcttgaatctccgtgaatcacgtttccattcacatcgtattttgctggttttgtgacgtcaatttggtattgaacgccatcgattacgtcgaaattataaacagggaagcttgggtttaataattcctgctcttctgttttattcggtgtaatttgattaaacttacccgcagacatatcaatccagtcttttacaacagaaccttttactttaaccgcttttaacgtgttgtcatatagatacaggtcgccagcgcttcggatcgttaagtcaccttttttaatttccgtatattcatcaacgccgtttcttcctgctttaaaaggtgctccaactgataaaattggaaggtctttgtattccggcttattttgagaaacatatttttctacgtaatctttttgtgcgtttgtcacaacttgaatagatggatcatcttttacaagagaaaaatagctgtggatatcatcggtcgttttaccgattggtgtgttcacgtatttaaccgttgcatcatgatctttttgaactgctttaacaacgcctttatccggttctacggtactttgcgtaaccgttttccctgacgcgtcttttacgtctttatacgtttcacgcgtggacgattgagagcttactactttccattttcctttttcttcttttaacgttaagtcgattaaaccaagtgaccctccgccgtaacctgcttgaacagccggaacgccgttgatcgttccttttgcattatcaactccaggaagaggttttttatctgctccaaggaacaaaccgtctagcgaagcttctgttttagcagggaagactttatgcgtgtgtgaaaacgtaatagcgtcaatgccttttacttcacttaatgaataaatgacatcttccgtgttttgcttgttgctgctaaatccagagtgagccattgcaacaactacgtctgcaccttttttcttcatttctggaatatatttgttggctgtttccacaatgccttttgtaatgacttttccatcaaggtttgctttatcccaatcgttaatttgaggcggcacaaagccaatgaaaccaactttaatggttcgtttctttccattttcatcgacgacttttttattcataattttataaggcgtaaatttatttttatcgtttttcgggttgttgtcatgatcatcaacgtagacattggcatttatgtaaggaaagtttgcgtcgttatacgcttctgttaggaagtctaatccatagttgaactcatgatttccaagcgttgcaatatcataatccagctgattcattgctttaaatacaggatgaacttccccttttttcagcgggtcaatcttagctttgtacgtgcctagaggcgttccttgaatgaggtctccgttatctactaataagctgttttttacttcttttcgagcgtttttgattaaggtagcggttttagctaaacccactttctcgtaagaggcatctttaaaataatcatagtttaatagattcgtatgaacatcggttgtttccatcaggcgtatgttcacaagcgcatcttttttattatggccttgatgcttgctttgctgtgagctttgtccaggatgacgttcttccgctcctgcctgtgtagttaaaagaggcatagataatagagaaagtgccagtgatgtggataggatttttttcgttttactacttttgttctttttcatctaccattcacctttcaagtaagttatcatcgctataaatctagcaactgttcaaaaatagtatagcagaaaagatttataaaggatgtaaattttttgattttttagtaaaccatttgtatgcgttttattaactttttgtaaaccgaaaaaatttttttagtttctctctttaaaaccaaggactatagtttttgttaattggatgaatcctcctttttaaatgagtcttattacctaatgcatcaacgttcccacgcccttttttaattcaaaaaaatttcatttcaaggggtgtgtatatatgtactatacataggatatgaaaagcagacattaagtttgtcacagcttctaacaaaatttcgaagatataaaaaagaaagaaaaggtttttgtcttctaataaatagatatatttatataattttacatttacaacaaggaaacgaggttgagtcataagacataactacatcaaacctacgtttacctgcaaataaaaaaatccgaacgaagttgattctccatcaagaatcttgattcatcgttcggatgttctttagttaacataattttttctcagccgcgttttcttactgacctaattctttaatttgtttcataatacttgatacatcttgaattgattgaaacaattcactgttttttagcgtttctggattgaagctcccatcctttatattggcttcatacgcttcaattccactaatgattttttcgttttgttgaacaagctgatcgtgcacatcagaagcgatgtcaggagcttttgtttgattaaattcttcagctttccctttcatttcctgcagcttttgctctagcttctttattgcctcgtcgtcattaacagctttttccgctagaggcggtatttcttcagcaaacttttgtgcttcactcacgtaatctttcgcatcatttgcgtagttcagcgtactgcttgtatcttcaagaaaagaacagccgccgaccataaaaagaacagcagttgatatgactagcatccattttttcacttagcactcaacctttcttattttcttttctactatcttcttttcgattttcgtttctttaactctttcataataatgggtacagctttttttattcctttttttacagcggggctttttaacagtctcgatagttttgacattttcaagctcctctctcattttgaaataacaaaaaacacctttaccacatgtggtaaaggtgtttgtatccagacctttaccaatgataacattggcaaaggtctcgctaacaatttgcattgtcaataaagccggagataataatctcgaaatgacgactttactgcaagagctactcccctttgagcaaaacagcattttttgttaatacaatcataacgcacgttcctgattatcgtcaacttatacggaattagtacacgtcttttttgataaataccagaaacgacacgagcagcccggcaagtccccaaatggttaaaacacccaaggaaaaccctaatgtcattccttcagtcggaggagctgtgccttgcagataagaagttaaatttaagttaaccataaacaaatacttagctgaatgccatgaagaaaccatgctgcttaaaattgtacctgcaatcaaacaagcaagcatcacacccatacctgcagctgtacttttaattaaaacagacagcataaaagcaagcgttccaacaactagtgagacaaaccaagcaagaccaaactccattaaaatatatctccactgcgaaattaaatggacgtccgctgtatttaagtcatttccctgtacgctaaaccccgtaagaatcggggctgtccagcctttaaatccaaatacaacaccagaaatgaggtacgacaaaacgccaaacattaaaattaaaaacgagacggacatgacgagcgtgatgtatttactaagcaggattttccaccgtttcacaggtctcgtcaacaataccttgatggatcccaagctgtactctgaagacactaaatccgctgcaataatcataatcatcagaggcagcaaaagctgaatggcgttttcaatgaaccctcgcacaaacgttggcgctcctggttctgaaggattgatatcgttatctaagtaatactgctgctgcgccacgcgaatttcaagctgcttgcgccaatcatctgaaatttggcttccgctcagccggttttgcgtatcgataatttcttgctgcagcgtactgcgccaatcggtcgttcctagcttttcttgaaggcgctgcgtttcgcgaagctgagcataggtaaacatggaaatcaaaactcccatgataagcgtaacgattaacaggcgcttttttcgaacgagcttgatcatttcattttgaaccaaactaatcaatcgattcgcctcctgtcatttcgataaataaatcttcaagagttggaagctttcgattcatttcttttaccgttactcctgcttgaatgagctgtttgttccactctcccacttcagcttcttcataaaacgtcgtgacatactccccctgcacttgtacaaagtccgtcacttgttttaaaacgtctattcctgcgggctgcggatctagcttccacagtaaacgctcttgctgagttaacagggtcttcaccgattctgtgtgaataacttctccttttgcgataatcgctactcggtcacacattagctgaatctcgctcagtaaatgactggatactaagacgcttagaccttcactttcagctaaaaagcgaataaatttacgcatatcccgaatcccagaagggtctagtccgttcgttggctcgtctaaaataagtacttttggttttccgagaagcgcttgcgcaattcctaaacgctgcctcatacctaacgaatacgtgcgaactaaatcgtggatacgctcttgcaagccaactaatgccacaacttcatgaatgcgttcttccgtcatagaaggaatcatgcgtgaaaagtgctgcagattttcccagccgcttaagtatggatacagctcaggattttcaacaatacagccgatatgctccatcgcttttgtaaactgcttcgatacgctgtatccacaaatataaatggaaccagccgtcgggcgaatcaagccgacaagcattcgaatcgttgtcgttttaccggctccattgggtcctaaaaagccgaacacttcgcctctttttagttcaaaatcaatatttttgataatttctcgttttcctattacttttttcagtccttttactgaaagcgttacttcactcatatcattccctcccttaccacgtaatgagcgatgctacacgttctgcgatcagcttgtagccttttgcattaggatgaaacttatcggtatataagtagtcatctacctttagctgaaacaaatcaaaggtcggaacaaaaacagtttgcttataattagcacttaattcactgcttttgtaattccattctcgtacaatagccgttgtcgtttttgcatcttgcaggttactaaacggattgtataaaccaatcaaaaaaatcgtcgtgtctttatttgccgaccggatactttttaagatgctgtctacgttttttaaatagtcattttctagcttttgaatattgtttttatttaaattttgcagcgtttgtccgccttgaaataagtcatttcccccaatggtgatcagcacggtatctgccgacttaatctgccgctgaatttgctgctgctttacttgacttgccagctgcgaagacgtttgaccttttattccaaagttacttaagagaattttcttcttcgttttttcttcaagattatcttttaaatacccaacgtatccttttcccactgcgtctcctgttcctcttgtcagggaatcacctaaagcgacaatcgtataattcttggtgcttttgttactgctgcttgtttcttgctttggctttggcatttcttttacagtagcttttgaggcgctaacataatcataaatagacattccaagccccgctgcaaacagcagacacgaaataatcgaaataaaggatacaatccatacccactttcctttcgctttcactggctgcactccttttcgtctttttagttatctttttttagagcttcaactgtttttagtaaagcggaccagtctaaatgaccccagccattttcgattccttgttcataatgacctttaacaagctctcctaacggaagcggagcggacacttttttggctgcatcaatagccaggtttacatcctttagtccaagctccagcttgaatccagcgggatcaaagtctcttttagcaattaaattgccgtaatttttatacacaggagatgcaaataagctattaaccacttcaagaaactgctccgcttgcatgccatactgctctaccataactactgcttcagaaacagcttctaacatcgatactaataaaaaattattgccaagcttagctacatttgataagtaaggctcgtctcctacagtgaaaatagtttgaccaatcgcttcaaacagcggccaaacgtgctctcttgcttctttattacctgcaactattactttgagagccgcagcagctgctgcgtcggggcgacctaaaacagtcgctgcaacaaaatgctgtcctgatgcagcatgtgcgcttgttaatttttcggataaatctacgctaatagtactcacagaaacgtgaataccgcctttttgaaggcctgcaagtataccgtcttgtgacatcgttacttcttctaaagcctcgtcatttgaaagaattgtaaagacaagatttgcttcttgtgctgcttgagcaggtgtctccacaatctttgctccttttttcacaagactttccgccttcgcagcagtccggttataaatcacaagttcatgacccgcttttatcatattttccgccatcggtaatcccatatttcctaaaccaattaaacccactttcatctttaccactccatttcagcactcagtatgtacatttatacttgttttctacctttagaaaaaccatattttcattattatataactacaggaaaagcgaatacaaagaatagcctttctaaaatgttcaaaatgtgacattttttagacgtgtcttatgaaaaacttgtcaaaaaaacacggatactttttagataaagcgcttgcaagcataggaaatttctgctaagatataagagaattatttttgttcggtggggatgtatgagtattgtcacttttcgtctttagatttgagcaagaatagtaccacaatgtgcgagtccgcacgaggaggcaacaattatggaacaaggtaaagtaaaatggtttaacgcagaaaaaggttttggattcatcgagcgcgaaggtggagacgatgtattcgtacacttctcagcaatccaaagcgaaggcttcaaatctttagacgaaggtcaagctgtaacatttgacgtagaacaaggtcaacgcggacctcaagctgctaacgttcaaaaagcataagaaacacaacatatcagaaacagatcctttaaaggatctgtttttttgtgtacaaacataaaaaagccctgtttttcaacagggccagtcggtacaaatacagaagtaaagttaatggtactcttagtatagcacaagatcataacaatctatacgaaataataaaataaaactttcatccggtacgtttacctatgtttatagctattccagactctctagggcgctcgcaaatcgtttgattccttctcgaataacctcttcttcccctctgccaaacgtaaagcgaatagctccgctttgagaactcagcacgcttcctggtacaaaagccacaccccttttaagcgattcttccagtagacgatagtcatcgaccggctgattcactttgcaccataagtgaattccgccttgaggtgaatcaaaagatacttttgatccgagcaattcgttcagactcgacgacagggcatactcttgctttttgagctcttgtctaagcttttcaatatgcgaagaaaacgtaggagaatctaagaattgataagcaatccactgcggaaagatgctgtgaccaaagtcaatttgctgcttagcgtctgccaggcgctgaatcacttgctctggccctactatccagccaattcgaagacccgatgccacgattttagaaagcgagctgatatagaggacatttccgttctcgtccatcgatttcagcgtttgatgtacatttccgtcaaatgccgtgagtgaataaggatcatcttcaataagcggaatgccgtattctgaagacagctctaaaaaccgctttcggcgtgcttctgataacacaataccggtcgggttttgataatacggatttaaaaaaaccatacgaatacgatgctttttatgtaattctactaagtcctccgggttggctccatttttatctacaggcagcaaaaacgttcgtaaacctgctgattgaaaaagcggcagtgaatagctataggacggatcttcaatcgctactgcatctcctggttttaacaaacactgaacaatcaaatgaagtgcttgctgtgcacctgatgtaattaaaatggaattagcatcggtggagatttttcggtactcatgaacatgagcagcaatagcgtcacgcagacgttcattgccgtgaggatgatcatagcctaaatgctcattaaacggcatgcccgctaatattcgctgaaaatcttcacttggaaataagctaggagctaattctccgctggctaagtttacaaaatctgttcgcaaagcttcgcttcttattcgctgtacgagcggtaaattaggcaaaaatgaaccgtcttctacatatctcccccagtttggaatacgtttacgggaaatcccccagatgctcgaactaactcgcgtgccgcttccttttttacgttctacgattccaagtgcctgcagttcttcataagcagctactaccgtgcttctgttcacgtttagctcagcagcaagcgttcgttctgatggcagcatagaatccggcggaaacgctcccgatgaaatacagctttcaatatattctgcaatttgtttataaatcgcttttttgctagcgcgatctggtctccagttcatgcggcgtcagtccttacatttaaactttcttattagtagtttatcctttatctctcttatcttaaagcagttttataaaaaaagaccatccaattcggtgtttttttgctcatccactttacaaaataaatataatatcacctcttttcatttgccagcatttaagtttacataataattttatagttaattaaaatacattcaccattccaacaaaaaaaatccaaacgaagttgattctccattaagagcttcaattcatcgttcagatctttaaatactttcgtcacagcctcttttttatagaggcggtaaatctagcttgccttcttgaaacaattctttcaccatatgcttggcataacccgttgcttgtcctagcgtaatcttagctggcataggcgcttcgtttgcatcaacgattacatcgataatacacggcttgttttgcctaacagcactttcaaaagccggcagcagctcttcttctttttctactcggtagccaacacctccgcaaatatctgcatacctagcaaaattcgggtttgttaaatctgtcccaaattcagcatttcccattacttcttgttcaaatttaatcatgccaattttatgattgttaaatagcactacgactagcggaaggttgtatttaacagctgtaataaaatctgccattgtcatcgcaaagccgccgtctccacataccgcaaacacctgcttctcgggataagcaatttttccagcaagtgcgcccggcagcccgcagccgagagtcgctagccagcttgaaatcacaaactgctgatttgtcatacgaaaatgacgcgccatccatactgtgacgtttcctacatctacagacaagaccgcattatcatccgctacgtgctgaagcgctcgaatcactcgctgaggcttgataggtacactttctttggcttcttgggtatcaagctgattccaccactttttcatacgttcttgactttgctctaaaaactggcgatgctctgagcggccaacgttttctaaaaaccactgaaccgttgctttcgcttctcctgcaagccctgcatctacagggtatcttttgccaatttgtgcaggatcaatatcaatatgaatcgttttcgcatggtctggcaaaaagcctgtaaacggataggacgtcccaatcatgatgagcgtatccgcttcttgcatcgcttcatacgctggctttgtcccgattaacccaagtcctccgagacaatatggatgttcatccggtactgcgccttttccaggaagcgtaaggacaataggtgccgcgattttttctgcaaatgcaagcagctcttctctcatttcatgtgtgccgcgaccagctaaaataaccggactttctgctttaccaatcaaatcttttgctttttcaaggtcttctctgtgaggaaagacgtcttgtttaacgattatgcttgatgtttcccgtgcttctgatccgacttcaaaacgaggaatatcatcgggaatggttaacacagccacaccttttttagcataagctgttcgaatcgcttgattgacaacagtcggaagctgctcagcggacatgactcgctggttatatacagccacgtcatcgaacattcgctctaaattaatttcttgaaacgcatcgcttccgatgagatctgattctacttgccccgtaagtgctaacacgggagctttgtctaactttgcatcatacaaaccattcagtaaatgaatcgctcccggtccggcaatagccgtgcatacaccgattttaccggttagctttgcatatgcagccgctgcgagagctcccgcttcttcatgcctcacttgaataaatttaattttatcctgggctttgcgaagcggttcaataattgaattaatggagtctcctggcatgccgtaaatatgatcaacgccccattcaattaacagttcaatcagtttttcccctgctttctgtttaaacatatgactgacccctttcttcttatatatagagatagtgtgacctgatacgctctttcttacttattttcactcatataattttcgttttcattcattaaatgaatgaaccactttcgttaaattttcttcattccttgcaattatcattaacttttgctattctataagaagaattatttttgttcggcaacaatcgataggtgaatactttcgtcttaaagattttgatcatgagcaaggatagtaatacaatgtgtgcatagcacacgaggaggcaacattcatggaaaaaggtacagtaaaatggtttaacgcagaaaaaggtttcggatttatcgagcgcgaaaacggcgacgatgtattcgtacatttctcagcaatccaaagcgaaggattcaaatctttagacgaaggtcaagctgtaacattcgacgttgaagaaggtcaacgcggacctcaagctgctaacgttcaaaaagcataagtagaaaaagactctgatttcagagtcttttttttatgtagaaccacgcataaaacctttttaacgtgcagtttgtacacgttattataaataataaactaaaaaagtctcttcatcccgaagagactttttgtggaagaaatagttgaagaaataaagtgtggatgttgcgtcgtcatcattttttaataattagcaccagccgccgccgaagcaagaagcgccgatgatgattaataagatgaaaagtacaatgattaaagcgaaaccgccgccgcagccaccgccgccataaccacaaccgtatccgtaacctccgtagtatcccatgtgtttcacctccatttgctatactttaagatatgtggatttagttaaattgctcctaataattccatagaacttttgaaaatgtttgtcatacactaaaaatactgcgtttttcaaacatgccccataaagagataaagcatttgattttatgggcatttactcctcttttctttatcttttaaaaatgtaatcgctccctttttcatgaatgtacaccgtgctgaatacctttagttatgtacactcacacgggagggatttaatatgttaacactcgaaatttcaaagcaaatcgttaaaaacgtctaccctattgtcttatcgaatcggagtaaaatctttcaagaggaagtgagcgtcgccgctttgcaagactactttggtcttgatcatgcctttagcgtgtatgcagctgccaccattatttatcatctagaagccgacgggtatgtatccaaacctctgaagcgcaatgaatacaaacgaattttgctcaaataaaaacaagcatccccgcaaggatgcttgtcttatttatagctatacctgtcgaataactgctcgactcttttatggtaatcggcaaggtagtcagaaagctcagttttactcaatttatttgcctgttcctcaaatagtgacagcagcgaaattttaatcattgccatttccgtttccgagcgattttcatttcgcaaatcttttcttaaattccacaggctttgctccatttcatgcttcaattgttctagtgagtgtggtttttcagatccggcacgaatatcttttttaaatccactcatcttatcactcctcgcatttgcacctgctagatagtatctaatgtatactataccataaataactatacgaggcttaagcatgccttttaagcaattggtcacaaaataaaaaacatctcgttggatgtctttaacgttaccttttatcttacttcgtcttcttcaccttttacatatttaaaaaatgaatcaatcatttcgtttaaaaaatcattgcgatcttcaaaattcataatttctaaaaattccacaatatccttatctaaactaatagaagcgggaacataagcagccgcttcccttctttgcgggaatggaatcacattatttctcttcttcataaaacaccgtcctttttctgtgctttactagtgtaagctttcaaggaacgatttgcaagtccctctgatgtaaaattttatataaatattcttctgaaaagacagggtatatctttagctgctcaagtaggcccatttgacattagctttttcatattctggcgtcatattaataattcgctgctgttttctcttttccttttggcatcttttagcaaatttaaacacaaatattttaaaagaggtttttatttccttcgtataggctaaagaaaggaaacaacatttttatatggaggggttacaaatgattgcattaactggaaaagttgcgcttgtgacgggagcggcgtctggaattggacgcgcttcagccattacactagctgaacaaggagcgcgcgttgctcttttagatttagacgaagaaaaattacaagaagtaaaagagaccatcatgtcgagcggcggagagtgtatagccattaaaacagacgtatctgactctgaaagtataaaagagagtatcgaaacgatcagcagcttatggagtcaattacatattatttctattaacgcaggcatcaacggtacgttctcttctattgaagaactatcaccagaagattggacaaaaacgattgatacaaatttaacaagtacttttttaactgtgaagcattctattccttatttgaaagctcagggaggaagcattattattactagctcaattaacggcaaccgtacattttcaaatatcggcatgagcgcatacagttcctcaaaggctggccaaatggcgttcggcaaaatggcagctcttgaactttctacatacggaatacgggtaaacgtcatttgtccaggagcagttgatacaaatattgaaagcaatacattccgtcaagaagacaaattaaaagaagtagcgattccaattgaatatccaaatggcaatcaaccgcttgctaaacgctcagctaagcccgaagaagtagcagatttaatcttctttttagcttctgacgcgtccaaacatattaccggaagtgaaatgtttattgacggcggagaatcgctgctgtaacgtacaagcccctgcattatctgccaggggcttgttttttgcttttatgcacaacgtctactccacccgaagcagatataatgctgcctgtaatcatatctgagttttcatcacaaagaaactcaataatacgcgcaatgtcttctcccgtacctgatcggcccacaggcgtttccttgtcttctagtaatcttgcttttataatatcactttctttcatgtctcctacaatatctccgggacagaccatattggccgtaatcccgtattcggctacttctagagcaagcgatttggtcagagaagctagccctgacttagcggcactaaaagccgcgcggtacatccatccaggggtgtgctctacatcttgaaaaccgtatgtaataacccttccaaactgctgctttttcataataggaacaaccgcttttacaaaatgaaaaacggagcttaaattcccttccagcatttcataccattcactatctgtgtactctattaatttttttctttcaaatacatatggacctgcattattaattaaaacatcaatacgtccaaatcgttccatgacctgggcaacgacatgttcaatatctgctttactcgttatatctccttctacaaactgtacgttgtctttatattgatgccattctttttgcagttctcgcactttatttttatcacttcgaaaatggacggtaacggaatactgcttttttaaaaactgttctgttaccttcttgccaatacctttatgacccgctgtaatcaatgcatgtttcatcttccttcacctctttcactctacttatctactatatatattagacagctccttagtttctcctttactaacaaaaaaagcccttgactaaagggcctttcttttacggtcttaacaaaattttccctatacttttccggctttcaagcagctcatgtgcttttgctccgtcttttaagtcaaacaccacgggatcggttagcacaagctgacgtttactaatccactcaaacagctgctgtgaacgtactttgcgttcttcatgtgacacaagcacgttccataagtctccgcctgtaagcgttttagaggtatccatcagcatacgcgggtcgaccggggccggatcgcctcctgccattccgtaaaataccacggttccgtttgtttttacggcttcaaagcttttttctagcgtaactcctacagattcataggcaacatctgcgcctcgcttcgttacttctttcacttgttccacccagttatctacgtataaaaagacatagtcagcgcctgcttgagccgctgcttttgctttttcagaagatgacgttaagccaatgacctgtccgcctaatagcttagcaatttgaactaaaagctgacctacgcctccagcagctgcgtgaacaagtacataatcgccgggctgaatactgtagctgtcttgtgttaaatagtgcgccgttaacccttgtaaaagcacagaagcagctgcatcaaacgaaatatcgtcaggtacggcaatgattttatcttgtggcacggcaacaagctctgcatttgcaaaaggaacgtcagcaaacgcaatacggtctcctacgttaacgtgacttacttctgctcctacttcttctaccacacctgctccttcatatcctaaaatatacggaggtgtacccgttaagtgatagttcccttttcttcggtacacatccgcaaaattaagtccaattgcttttgttcttaccaatacgtctgttggaccaatagaggggttcggtatatcttgatagtgaagaacgtcaggtcctccaaatctttcaaatactaatgctttcatagataagttacctcgttttctttatgtattccctttcatcgtaattcaacgagataacaaacacaagtttcttactcagcaaaaaacgctttgtctcctcaggagacaaagcgttcttttactttgtttgcgctacaacttctcgcatcgtcccatttttttgataaaacgtatgaaaagaaaaggctttttcaagaacgtgcggtgtttgtccgcctcgcgtgagcgcttcttcgtaatacgccataagctggtcgcggtacattgggtgggcacaatttttaatgattcgttttgctcgttctcttggagcgagtccgcgcaggtctgcgtatccttgctctgttacaatcacatcaacatcgtgttccgtatgatcaacgtgcgaaacaaacggcactatgcttgaaatatcaccgtttttagcaatggattttgttacaaaaataccaaggcgcgcatttcgggcaaaatctcctgagcctccgattccgttcatcatttttgttcccatcacatgcgtggaattgacgtttccgtaaatgtctagctctagggcagtgttaatagaaatcagtcctaagcgacgaatgatttcgggatggtttgaaatttcctgcgggcgaagaatgagcttatctcgataggcttcaaaattagagaaaacttgttccattttatctgctgaaagcgtaattgagcagcaggaggcaaacgtaacttttcctgcgtcaaataaatcaaacacagcatcctgcaatacttctgaatacacctctaaatcatgaaactctgaatctaacaaaccgtggaaaacggcatttgccacagatccaattccagattgtaaaggagcaagcgattcagttaatcgcccttctttaatttcttcacgtaaaaatgaaatcaaattttgagccattacaaccgtttcttcgtcaggtgctacaatcgtagacggtgaatctagctgatttgtaaatacaataccctttactttatctaaatcaattggtatgcctaacgaaccaatacgatcatcagattttttcaaaggaattgcatctcgctgtccttgaacgcccggatcatacagatcgtgaataccttctaacagctctggctgcgctgtgttaatttcaataataatagattttgcatgctcggcaaacaccattgaattgccaattgacgttgttggaatcatcattccgtcacctgtgatagaaaccgcttccaaaatagcgaaatctattgaatctaacacgcctgaacgtacccattcagaagtatgcgataaatgctgatcaataaactgaaattcaccttcattaatttttttacgcatggtagggtccgcctgaaagggcaaacgtttatttaacatgcctttttctgcaaatagcttatccacatctgacccaagtgaagcaccggtatacacgcttacttttatcggttctgtttccgctcgtttcgctagcgcaaacggtacagctttgacatcccccgcgcgtgtaaaaccgcttagaccaagggtcattccatcttgaatccaagatgctgcttcttcagcagagacaacgcgattctgtagtgcttcatgcttaattcgactgcaaacgttttccattctgttcactccttgtttttgctcttttttaccattttactgtaaagcaagcgtctacaagagtttttggaatgaaatggacaaaaatagcgataaaacagcatatttgatgataattaagcaaaatgacggttaaaacccaaggagttttcgaaaatagctggcgtacgactgactgaccggaattttttctccgctgctcattactagtaaaaaagttgaatgtgtatcaggataaatttcttgaatttgcgtcacattgacgataaaggaacgatgacagcgcacaaactcttcttttggaagcacataatcaaattcatttaacgtgtatttatgcgtacccgtatacttctgtgcgtacacatatgtttttcggtcacgcgcttctacgtagataatttttgagaaaggaaccggtatccatccctcgttcacctttaacgtcacaactgactttccgctcgttaacgcaggaaaaatcgccgtcacgcacccttgaacctctccttcgtctaagaaaggcacggccatgccgtagtaaggcgtgccaaacacgtctcggtgaataaattctgatactttttgctttcgttctaatgctttatatgtaatcgttccttttttaatttgatctccagggctgatttttaaattaattcgtttacttgcccggtaatacacgtacgtttctagatctgaaacggcaatcgacgcttcatcagagaacaattcgctgataacgtctaataatgctgaagctttaaatggtttcatcttttcaccttcttttgtctagtcaaacacgctgcttctttattgtagcgcaaaagcaaaagctagtgggaaagaagcatggaatttatcttttcaactgcataaaatttctattttttcacaacataaaacaatgaaatgaaggaagggtgaaatgtatgggctatgctgaatcgacgtttcgaatcgcctgttcattttttgtgctgcttcttttaacgcggctcatgggaaaaacagaaatcagccagctaaatgtgtttacgtttattacggcgattacgattggtaatattgcttcttccctctccactgataagcgagtagagattgataaaggagtttattcactgctaggatggacatttttaacgatcgctatgggctatcttggaatgaaatcgaaaaaagcgcgccatcttattaccggtgagcctaaaattgtgattaagcaagggaaagtgatggaaaaggcattaaaacaagtccggctagatattgaatctcttttaggcatgctgaggcagcaaaacgtattttccataaaagatgtagaatacgccatattagaaatcaacggaaacctttccgttatgcaaaaacaagataaaaagccgaactcgtggtcaaaaacgcttttatttcccacttcaacgggcgttatttacgatggaaaagcgaatgaagatgccttgaaggacctgcatgtagataataattggctgcataaacagctagaaaaagcgggagtcaactcaattgatgacgtcttttacgctgaggtccagtccgacggatcgctttacattgactataaaaaagacaaatttaactcataaaaaaaatccgtaccaaaaggcacggattttttattagcttgcttttttcacacgatttgtaatggtatcttcttttggtgatgttttacgaataaagaaggctaaaacaaacgctatcacacttaaaatcgttgcaatcataaacgcatcgttaatacccattgccgtaccttgattcacagcttcagccatactgcctttatctgccggcaaaatttgctgattcgttacgatgtttttcacgtgtttttcaccttgattcatcataatagatacaaagaacgccattcctacagctccagcaaccattcgcagcgtattaaccatcgctgtgccgtatttatttaagctaagcgcaagctcatttaatcctgctgtaaatattggcatcatgagcagcgacataccaaacatacgaacagtataaacaatcattacatacataaatgttgttgttgtttcaagttttgttagttcatatgttgtcacaacggtaatcgctaaaccaataacagcaagccatcttgctccaaacttatcaaacagacgtcctgtaatcggagacataatccccattacaattccccctggcagtaacagcaagcctgaaagaaacggtgaaaaaccgcgtacgttttgcatataaatcggcattaaaatcatacctgaaaacattgccattgttacaatcacgttaatgattgttgttaaagtgaacatacggtaacggaaaatacggaattcaagaagcggctgatcgatttttaactgacggaaaataaagaacagaattgaaataccgcctacaatgaacatagctaatacttcagtgctggtccagccctttgtaccgcccgtagcgaacgcataaagcaagccgccaaatccaactgttgacaaaataacgccaagcacatctagcttaggtcggcttgtttccgtcacgtttttcactaaaataatagccgcaattacgttaatgagtgcaattggaaacatcataaagaataaaacgcgccatgagtagtgctcaactattaaaccagaaagcgtcggccctactgccggtgcgaagttcatcgctacaccaaaaatccccatcgcaaagccgcgtcggtcaggcgggaataatgtaaaaataacgttggtaattaacggaaataaaatccctgctcctgctgcttgcacgacgcgtcccactaaaataacggaaaatgtcggtgcaataccgcaaagcagtgttcctactgtaaacagccccattgctgtaatatacagctgccttgtagtaaatcgattcattaaaaatgctgtaattggaataacaattccgtttactaacataaagatggttgttaaccagttacccgtagccgccgttacatggaaatgatccatcatttgcggaagcgcaatgttaatcagcgtttgatttaaaaaagcgacgagcgctcccattatcattacgccaaaaatagaccgagttcgggcttgatcggactgttgtgtttgtgtattcattttaacaagacctttccctttaaaattatctgtatgtaaatcttcagatgacaaccaggttaagaatatattttatgtgttcattctattaatttatgtcacgaatatttaatgaacttaattatataccggataaatatatctgtttccgaaatatttgtcaacaaatatgatcattttcgtaaaacttttccatcagtatatataaagtagtataccctttaatgaagaaaaaaatgagagcccttcaacgaaggctctcatttccttaagaaatacttattttaagatttgaacttttactgtttttcttccccattttaacgcttctttttgagaaggaagaagaacgtcaattttatttcctttaatcgcaccgcccgtatcagctgcgattgccgtgccgtaaccctctacgtatacttttgaaccaagcttaatcacttttggatcgacagaaatcactttttgatttggattctttttcaagtcaattccaatcgctgtttttccgctgcagcctttgcagttcgctgtatacgctgttgctgttactttaaattctttcacaacgtttgaagacttcgcaggcgctgctttagcaggcgtgcttgattttgtttgagatacttttaatacttgtttcggatgaatgctgtctgactttaagttattccactgtttcagctgactaaccgatactttatatgtctttgcaattttgtatagcgaatctccgctttttactgtatatgtatttgttgcagctgatgcaccacttgccactccgaacagtgacattagaactaaactgaacgtaatcattgtctttttcatgtaattgatttcccctttatctaccaatacataaaaaataacacatgaatattacagttatatttcagtaacatgtcaatagtttgatagtttagttacagtaaaaataaagattcttccttttaaactagtaaattaatcacctttactcttcaaaaacatacatatttaggtatatgacggtgcttttacacacatttataatggattatttcatttgtaacatttcactggttctagaggcttatactttgttttatattggttatttagaacatagtttatttaaaattaataaatgcgttaaaggagcttaatataaatcactttttacaccgttggttggagagcaagacttcgctttccactggagtcttgctcttcaaccaacaactagaaacgcatacatatatggccgccataacaataaaaaatccgaacgagttggattctctatcaagaatctcaattcatcgttcggatttttcttccactaaaatacttttatcatagcctttttatttgaaattaagatgcctgcattacttgttaatatggctgccactgaagcattttagctgcctcgaaccttttttctacatttggccagtaaactattttccaccaattatcaacgtacggatcacgttcatttttgtactgcaaataataggcgtgttcccatacgtctaatacgagcagcggaatcgtatcccactgcgtgagaagctgatggcgctcagcttgcagaacttcgagctttcgcgaacgcggcgaccatactaagatagcccagccaacaccctctactttttttgcagcttgagaaaagtgcatcataaacttctcatagctgccaaagtctttttgaagctgctgcagcagctgtcgtctcggcctccctcctccttctggactcataatttcccaaaagattgtatgcaagtaatgaccggagccatgaaaagaagcttcccgttcccaatgttttatgaggtcaaaattgtttgtgttacgggcttgctgaagcatgagctctgctttatttaatccatctacatagctttgatggtgcttgctgtgatgaagacgcataatttcccggttaatatacggttcaagagctgaatagctatagccaagcggcggcagctcgtgctgtcctggcgctatcgattctcgctccctgccgtcgtctccgagccgctcttttaagactttatcaatatgccgcactgcattattgatttcttctaacgtatattcgttgacatcttcttcacttaaatattcaagaacgtcttcttgcgtgcgcgttatatatgacgttatatctacttctgtaatggcttcttcaaataccggatcacatacttgttcaagccaggtctgaacttccatcaagtatctttttctctcatcttgatcggccatactttccctccttacacctcatcttcactatcatattcaaaagaaaaagcaacataacttcctacttgtatctattgagttagaaaattcgacataaaaaaggcaagagttcctttaagcttgaactcttgccttttttattatattttctttgccatattcacataatcaatcgtttcttgcttgctaacagccgcgtgcttcagctttggattataatagagctcgacttttatattattgatttcacagtcatctggcatatcctgcaaatccgttaaaaatggcagcaagtgattgttcatatcgtattcaaacgccccgttttgcaagtaatacaccttcggcacatagttaatatggcgaaaaaacttcactgcgttaattcgctcaccgtataaggctatcacttcatcttctgtcaagttcggataagataaattaaacacttgccgaaccggcgttttcagccacttggtcaagcaagtctgcggattgttgacaagcgcttttgctccttttacgtaccccgctaaaaacatcgacataaagccgccgcctgatgatccgtaaaacagcacattggacgaattcacgtgcacttttttcatgaacttttcaattaaaacggcaatgtcttttaaataaaaacggtcgcttgtcccttgtccccacgcaagcgaaacctttcctaagtaaagcgtaggatcgttataataaataatggaatcttggaattcattcatccacgaatggcgctgaaaataaggaggacctgccggcatttcctgacttgcccctcctcctgagccaaacacaagcaaatgagaagactctcttttcagccttattaaaaactcaaacagcactccgttccactcgaccgcgactaaaacgggcctattaaacggcagctgaagttcatctagcttttcatacgtactagttattttttcatattgatcaagcaacagccctgcaactcactttccttaaaatgatctgtcgtatgcgtctgacattgatcatggctctataaaaaaagaacctgttacagtgtatgaaaatcagtggacaaatgattgtacatctcatcaaaaagaggcccttaccacatttccgcctaggcttctgtcacgaaatacaacgcttcacatacgatacagcatcataaaaaattcaaggatcggagctgaagactgttgtcaacgtcttatatggattacaataatccaaacgtgcaatacttttctgatgtgaataaaaacagacttaacacgcgaaacgatcaaaattacattaaccgattaggtcgggatgtgctcaacacattaggaaatgtgtcgttactcgatatttatttaagcaaaagccgcgtggtcgaaccgcactatcatcaaaatgccgctgagcttgtttactgtatttcaggctcagccgtcgtttcattaatcaatccatttaacaacgaagtcacaaatattccgattactcccggtcaagtagccaatatccctcaaggctggtggcactgggagattgcgtctgaagacaatacgcatttacttgccatttttgacgccccttacccggaatacatttttggatcggacattttaaataagacgcctattgaagtccttgctcacacgtattgcttagacccggagcagctaaagaaaacgctggctccgttaaaaaatcaaaccatcgtgattggaccaacggacgaatgcggagaaaaagaacaatataaaaaggaaaaacaagctggcccagcctactatcacacggctccttatacgtatccttcgcctcagaatccctactatcaccctcaaagcccctatcactatcggtactggtagaaacaaaaaaaccccgctgccaatgcaacggggtttcttaacgaatacataacattattgttcttctatatacgtgctatgaaaggctgcttcaatatatgcaacttggaaatgataatgtccaattaaatatttcacaatgtccacctggtcgattttgccgggcttatcgaccatcgcttcttttaccatttcttcgaatgtaccttgatcaaactgttcttcatggacaacaattgtctcagagtacatttcgtcttgtccttctgaaatgcgatagtaatacaattttttcacctcgatttgtcttaagtgtatgtatacccttaactactcattttgaaacattttttcaacgttctttttccgctttacgataggctgcggcttttgcttttacaagcagccttgtaacccagtacgccactaacgttattcctatatcaataagaaaaatataaaacaaactcattcctttttctgaatcaataaatttaaaatggtgttcaagaggcgccagcccaaatgaaaaaacagcgctcagcagaatcgtatacagataaaaattcttttgccgattcgtacaatattgataaagcagcagaaagcctactggcaaaatagaagcggtaatattcgttgcgttgggaagcagcggcgttaagaaaaacgtgtgccttaaatgaccgcttctcccaagtgcaatatcaatatatgcccagagcatatgcactgtgtaaccgaagaaaaacacctcaaagatcctcgtccaatctacggtaaaatacaacaacacaagaggaagaacgagcgaagcaagtaccacccaaaactgccagtttccgaaatctgaatactgatgccaatacgacgataataactcctgcagcttatcgctttgttcatgtatgtttccccagtatcgttcataactcactgaagtaacctcctatatagagtctctgcttatgtatgtacgaataagctccattttatacagagaaacatggaaagcagccatttattgcttgccatcacccaaataggtcaccgggagttcctgctcaatgactttacttgcttttcgattaacagcatacgcttttgctgttggtcttgaactaactgataccgatagcttttcatctttaaaatgcagcgcgactccatcatctacagcatagccttctttcatttctccgcttgccattaactcatgatacgacggtcttcgattgctttctccgtcgtaatgaggacagttgctgccggttaaaaaacctaaacagtcgattttagacaggttgttgttcattgaatcagtgacgccttcttcaaaccagcaaatcgaacctgcgcttattcctgctaagattattccttttttataagcttcttttagaattgtatcaagtccccactctttccataaagaaagcatattccttgtattaccgccgcccacatacaaaatgtcgtgctgcatcacatatgcttctaaattcataaaattttgagaaaacagcgataaatgagacggtgtgcatatcaacttctcaaacgcttcataaaacctttttatataattatccgcatctccgcttgctgtagggataaagcagattttcggcacatctgtatgagcttgtggaagtatgtattgatccagcagcagattatccggctccatcgaaaaacctccgccgcccatggctataatttgtctcatttcaatcattcctttcaaaaaagtgatatagaaaatgtaaaatcatactatttctcatagatgactttccgtataatggaagagtgaaaaaggtggtgcaaagcttttgaaaatagtacgaacacttttactaatactaggcatttttattattttgttttgtatttttggctatatcgattataacggtcaaaaaatggaactaggagccaaacaagaaaaacacattccttcctccattaacactgacggaggtaccattacgctatctgctgtaagcgaaaagtacgataaaacgcagtttggcttttttgttatccaaaacaattcgacgcataccttaacaattccttatgaaaatacggcggatcacttaaaagacggaaagtggtacgaagttgtgctaaacggattagagttccctgataaaaccatcacgctgaagccagggaaatcattcaaactagatatcgcaactcctaactacaagataggaaaataccgttttgtgcagcactttagagatgaaaacggaaaagagcatgtgttagcggctccttttgaaatcgtttggccgagtcttaagaacgttctcgggcagtttgattaaaggtaaaaaagcacttacccgctatgaggtaagtgctttttatcagctctgatttaaaacgcgaagcacaacttgctttgttccgacttttaccgtctctccgtttttaatagtttctttcacactgagactgtgcagcaaaagattttcttgaagcagcgtttcaaacttcgccacggctttctgtacttcttcgtctccgctaagctctaaattaatacgtgaattcacgggtaaatccagctttttacgataatcttgaaccgctcgaattacttcacgagcgactccttcctgcacgagttcttccgttaacgccgtatccaacaccgcagtatacatgccgtttgatgccactgcaaaaccttcttttggcactttttcaacaagtacgtcttccgtttcaagcgttaggttctctcctgaagcaagcgtaacacttagcttgccttgttcaacaaactctttccctttctcttctgaaaggtttttcagcgcttggttgacctcattcacctgttttccaaactttggtccagcctgtttaaaatccagttttaatacgtatgaaaccagtttgtcgtcgtcttgctccacgttaaagttctttacattaagctcatctttgatgacatcacgatatgctttccactctacatcttcttccgttaccacaagtgaaagactctgcaaaggctgctttacttttaacgaatgcgtatttcggatgcttcggcctagttccactacttgaagcaccgctgccatttctttttccagcttttcgttcactttcgtttgatcacatgcaggatagtctgctaaatgaacgcttttccctgtcagattttcatgaacatcatccgcaacaaacggggtaaacggtgctaatagttgacttaatgtcactagtacttcatgaagcgtatcgtaagctgctgctttttcgccgtccattccttctgaccaaaaacgatcgcgggaacgtcgcacataccagttgcttagctcttcaatgaatacagcgatttcacgagccgcgcttgtaaatccgtaatcttcaagatgtactgttgcgcgcttgaccgtgctgtgcaaacgtgaaagaatccattcatccaattttgttttttttaattcatacgtttgctccggatcatagccgtcaagcttagcgtacagcacgtaaaagccgtacacgttcacaagtgtatcaatgacttttgacttcgcttcttgcacgacacgctctgaaaatttcttcggattccaaggtgcactgtctgctaaaagcgcccatctaagcgcatccgcaccaaatgtatgaataagatcaacagggtctagcgcatttcctttacttttagacatcttttgaccgttttcatctaagacgtggccaagagacaaaacgcgcttatacggtgcttttcctgtaaagagcgttgaaactgccatcaagctgtaaaaccagccgcgcgtttgatcaattccttctgcgataacgtctgctggaaactgcttttgaaacagttcgctgttttcaaacggatagtgatactgtgcaaacggcatcgacccgctgtcaaaccaaacgtcaatcacttccggcgtccgcttcatttctccgctgcagaccggacacgttagctgcacgtcatctacatacggcttatgaagttcaatgctgtcatcaacgtaatgagacgcatgtttctgaagctctttgatgcttttcggcgctacttgatgctgacacccttcgcattcccatacgttcagcggcgttccccagtagcgctttctgctgatgttccagtccaccatattttccaaaaatttgccaaagcgaccgtgcttgatatgatccgggtaccacttcacgctttcattatttttcaaaaattgttcttttaacgccgtcgtttggataaaccagctttcatttgcgtaataaagaagcggcgagtcacatctccagcaaaacggatagctgtgctcatgcttttctttatgatacagcacgtcttgattcgctaaataacgtacgatatcaacgtcgcagtctttcacgaaacgtccttgaaacggcggcacttcagatgtgtactggcctttttcatccacaacattcacaaatgaaaagccgttttcttttacaactctgtaatcatcttccccgtaagcaggtgctaaatgaacaacgcccgttccgctttggtccgttacataatcagccgttaccacttcatgccctttttccactttcacaaaattaaacggcggctcatacgacattccttttaactcatttcctttatgatgagataaaacgctatattctccttttaacactttgtctgcgagcgcttctgccactatatacacgctgtcgccttgctcggcgcgaacgtagctcatctcttcatgcaccgcaagcgccacgtttgatggaagcgtccaaggcgttgtcgtccagcccaaaaaatactcattatcgcggtttttcactttaaatttgaccgttaccgttaaatcttttacatctttatacccttgcgccacttcatgcgaactcagcgacgtttgacagctcgggcagtaaggtgatacgcggtggcctttataaagaagtcctttatcatgaatcgtgccaagcacgttccatacactttcaatgtatgaattctccaaggtgatgtaagggtcttccatatcaacccaatagccaagctgctctgtgaacgtgcgccactgcttttcatacacaaacacactttccttacacttgttgataaaagcttctaccccgtatttttcaatatcatgctttcctgaaattccgagctgcttttcaacaccgagctcaaccggaagtccgtgcgtatcccagcctgcttttctgattacttgatgccctgtcatcgtcttataacgagccaccacgtctttaatcgtccggcctagcgcgtgcccaacgtgaggcaaaccatttgctgttggaggcccttcataaaatacaaacgaaggatacccttctcgattttgaaccgactgctgaaacacatttcctttttgccactgctgctggatacgctgttcgcgctcttgcgaagactcccttacattcacttctttcatgtgataccactccttttaaagttaaaagcacacaaagaaacccgtccctatgactagggacgggttttaaccgcggtaccaccctggcttctattgatccgttcatcaatagcactcagcaacgtacaatcatacgcgttctttttaacggtagactaccgttcaaacttacttacagttcagtttgacttctcagagaggatattcccctgcagcttgaacaccggctttcagctatcaccagctctctgtggaacaaacttgcagggtactgattctcttcaacgaatttgtgtgcttttattagtagctattgtatgcggtttggaagggaatgtcaatgtttatgaaatttatatatgttttttcttataatatagtcctccaatgataaaataaccgcttactactgtttgctgcctttttcacgctctcaggaaaaggcaatgtacacaaaaaaccacctcatttaaggtgggtattatttggctccccgacttgaaagatgctctttaaaaccagttaataaaaggcgggatgctctgagggaaatgaaatagattgcacgggtcatatgctcgtttcacttctcgaagctttttaaaattctctccataatacgccgttggccaatctctgatgaaccggtccggccagttcacataatctccagttgtatatctcgataaagcatttcttaattcttcaatccagcgaatgtttgctcgctcttctgaaggatggctccatgtagcaaggtactcctgtgcgataatagcatctctataatagaaggccgtttcattagagcccacttcctccactgctcctccaagagactggtgccaaatactagatttttcattcggagcattttctaaaaaatgcttcattgttaaaatggcctcttttggaaaaggtttattaagaaaagaacctgacctttttcgaggggcgggttggtttccgctcggatcgtcaaaaaattgtacagcttcaatatatgaaacttcctttattactacttttttaggacacccaacatctattaaaggctgcagaagttcctttaacttgaatgatgaaccaacgaattcaccttgagcaataatctgattcgcttctttcgattttaactcaatctccgaagttaagcgcttatcggtatttgtggcccagtgctgccatgcatcaaaagcagcttcgaaatcttcccattcccatgtaattgaaaagattgacacctttgaaataggctgcaccttaaaggtaagagacgtaacaataccaaagtttccacccccgcctccgcaacaagcccaaaagagatcactgttgtgatttttatttgccttaatgagttcaacttctctttgttcatttactatggccatttcaacttcaagcaaattatcacaggtaagcccaaacaaccttgataacatcccaattcctccgccaagcacaaggcctacaagaccaacactgctttccgtacctgcagggatagtcgttccttttttccataattcattatatactttccctagattagctcctgcttctattttcgctgtcatgcttttactgtcgatcttgattccatccatttcactgacatcaatcactaatccaccgtttactagtgaaaaattttcatagctatgcctgccgcttcttattcgaaatgggacatgattttcctttacccacttcaatgcatttactacatcgtttgtattctgacaaaatacaattattctcggaaatttaggcacacctaaattattatttgttctagcctgttcatattccgcatcatcaggtgtaacgattcgtccagtaagctttgtttcctccacgatataacccctttcttaatacagataagatgctatatcctatgaattttcttcaaaaaagacacacagtttaaaggggagaaatagagagtagaaaacttactggaggggttctggacagaatactaatttattttcgatgcatcaactctcttgttgtagataagttttcagttgaacaaatctttgctgtcgattaaatttttcctgacggggttgtaaactatataaattgaagtacttttattttccgttaaattatttaaacgcgctacatcacggatttttttatttgagtataggacaatttatattcttgaaatgaatgattcgtctttccgaaaatgaaccttcttaattgtatttgcctaaaaaaacattggttaaagcttagccaacggttttgtcaggttcttcattttatctattactcagatatcgtatcctgctagatcaatatagtaattatcatcctccatcaccttctctaaaaactcttctaaggaatcggcgatctttatatcatcgtaataaatcgcattatgctgctcctgacttatttctatcagcagcagcgcactttcgttggcttcaaaaaataacaatttgccctcttccagctcttcgtaaagttcgatatcagggtaaaattcgaaatcgtttacttttaatctagcgtctctgatggaagaagggcccataatgcggtttatattatattcagatccctggagaaaaccataacccacctctaaaaaaaacttccttaactcaaaaggaagctttaagcctaacgttccttctactccttcaatatcactttcacatacggaataaaattgattatctttttgattcgtgacaaagtcgtatctcatcatttcctctcctttataacttacacatacgtacactcattacacattgcttaacttaatcctcatcagacaaagcaaaagcatcactaacatcctctaattcttccatgatgccattgaagtcaccctctatatgcaacaattccaccatctggataatccccacaccatccacaaggcaaatacccggatctatgtaatttaaatatgctttcaaagaagttatttttagtaccattaaccgctctactaattgcacaattgtttaaatctgctacgatgtcttcaaaaaaggcatcataatcttgtaggctctgtcgtaagttttcagctataacttctactattccttctaactcacgaggtttttcagcgtccgttaaatcataatatcgctcccatacgtcactcatttttaattctctaatgtctttccaactgtattcttcttcaccatatacttcttcatatgcaagatattcagccttaccataatcgtatattacttgtattttatctacatcttctttttctagagaaacctggccataattttttgatagctcaatgacctcttctactagagtattaaacttaccaccattattcattacttatggagccgcctttccaaattgtgattctttcttttttccgaatgaagccttgtattataaacccctaatcaatcccgagagattttcgctaatcctttcaaaagattttctttcataatcttctagctttacctctccactttcattgtctactactaacaacaaaccgttagattctattcctataggaatgttcacaagctgatgatgagctgctttataaagctttgtttcttgtttgaagtcttgcaattctatccccggtacaacagaatttaatactaagtcatatccgttgtaggttccagccagttctaaaaaccagtaggaattaaaataagccttaatatcgggatgcagctgaacgttaagttccttttctacatcttcaaaattattgtccacctcttttttcaaatatttctaaactatatagcccccttcatctttttcaccttcaaaaataaactgttctgtttcttccgtccactcagtcatagacaaagtaccgttaaaagctttccattcttttagtaatttggtaaagtatatttccattgcttgtttcacatttactattcctttcctcatcttctcgataaattatgatttcttcagctttatttttcttattaattcctcaagtgaatgctccaataatgttaattcgtttgtttcataatcttctgtataaacttttccggtcttattatctatgttaatggccatttcgtccggagaaataaaacctatctgtatgtatctaaattcctttccttgactttcatcataatgcgcaagatgtttaaaataacttcgtacatctttacccggttcaacaggctcaagacatatatatttcgaatgataaagaccttctaagcttaaaaataaataactgttaaaatactctttaattgaatgatgcaaaggcattttaatttcagcttcgatcatactaaagttttcaacagcctttttttctactggtttccaaaaaacatactcttcttcatcaggctcacctacatatagcagtggatgcatctcttcatcccatggtgcctttggaaatgtattatagttttcattccaataatctagcagtctctcaaaataatccgtcattatcccttttatactcatcctaagtctcctttgtttaaacttaccgactgaaatttgctcgatttctccttttaatttcctcttaaagtttttctcttggcattttctaataattaatagaataactttttgaaatgctcatcttgtttataccataggttttaaagtttcagatatccctctatacatttaaatataataaaaaaccttgaaaggtatagagccaatcaaggttaaataacttaacaaccatatagattaattttaaaagtcttcgtcccaattttctttggcatcaagaagtctatttgttaaaaactcataaaagttatctgctctttttccactatatccatcaattctgtcccacgacacaactacacattcagcgtcaattaggttttcagtatctaaacaatatacaaactcttcacagttttcaacaactacgtattgagttggcaatccaatgttccgaaatctttcagtgtttgttactacagatggagttgcggatttcccacagccaagtatatctactccaaacagtcctccagaaccataattttcaagaaaccagatataactatccggaaatttcactttaagtgctttttcaacttctttaataatttcgtctgagactcctccagtaaaatcattaatctcggaattgaattgaataaattcactcatttctttttggttcaaactatttctctcctcattaatatcctctaaaataagttcgctataacttacttttgaaatctctatatagtgcagtagattatccaataaagtgtattatattcttaaacatatttatcaatgtatcatgaaacgctgatcaaaatctacacttaacccaactagtgtttcttacggtaacagcctcagcactttcgcatttaataatatagtaataaagactccctattctctaaatcaacaaggaattacacaaaatatgtcacgaaaatgaaattgttacgataatggtatagtcgaaatcttctttggaattatgaagtctgaacctctttatttaaagcaattttaaaatgttgaacattttaaaaaggaattgaagaagtgtatttactataagcatagagggatcaaaacaaaattaaaaggcatgagtccagtccaataccgaactcatgccctgcaagttgcctgccaaaataacctgtctaactttataggatcacttcaaaacttaaggctcttttcagattatagcttactaatatttaatggataaaaattctttaggaaccacttttaattatatctattatattatgaatgttttcttttaattcttgattcctattctctttatactgatgatatgcctgaattcccctatgaataatagcattcatagtaggatgaaacgacttatctgtacactcaattaaaaaatcaaaaaactctgcactagctgagggagaatacgaaaatacttctataagtatatttatggtagctccctgaatctgtacagcatcttttttctctttaagagaatagccgtttatcataccgaaacaaaatgtcgatacaacttgtttttcttgttcatctaaattttccggggttaattggcatatttctaaaaaatgattaaccacctttttcatctcgctataatatgctaaattacgctccatttttccctcctaatatactaatatttttccatttggataatctccgtcccatccacaaggaatatgaccacttaaatagatgtctaacatactggtgtaaaaatctgaattataatatttctcatatgtaagcaccataatgatgttgataatatcaaatttaacagaattcactatatcacttgataaccctaatatgcttacttggctttcgattttatcaacaactttaggcaatacctctgttttaacttctctcactaatacattccaatttttattatacagctccggtttattcttggctaaataaccagttaaattatttctctcttcaagacaaatattttcccatttcactccttttacattcttattaactacttttttatttgataaataagaataattacttccttttggaagattagtttcaactccacagtattctagccaattattagatgttattgcttcaactacggcattatttagttccatatagttttctcctctatttattcttcaattttatttcttctattaattcttgaagagaatgtgccgctaaattcaattcattcgtctcgtaatcctctatataaacttttcctgtctcgttatctacgttaattgccctctcatctggagaaataaaacctatctgtatatatctgaattcattgcctcggctttcttcatagctcttcaagtttttaaaataagtcaataaatctttatctggctcaacaggttcaaggtatatataatttgaatgataaaaaccctctaagcttaaaaataaataactattgaaatattctttgattgtttcatgcaagcgtattttaatttcagtttcaattgtgtcaaagtcttcaacatctcttttttctattggcttccaaaaatatactcttcttcgtcaggctcacttaaatatagtaccggatttatgcctccatcccacggcgcttttgggactccattatatttgtcattacaataatctagtaatctctcaaaataattcatcattgcaccttttactttcttaagtctccttcattaatctttccatcactttaatttccttttttcataaccctttacactacatagatgtaacgaatctaaaacgactattgctaattttcaattgtaataaccatttctctaaaacaaaaaatatcactcgtgaaattcaagtgatgtttttgcacaaaatccaaaagtatttccttaattataaaaagtttaaaatataaaccttttaatgtattaaatcatccagctacatacnnnnnnnnnnnnnnnnnnnnnnnnnnnnnnnnnnnnnnnnnnnnnnnnnnnnnnnnnnnnnnnnnnnnnnnnnnnnnnnnnnnnnnnnnnnnnnnnnnnngggactgacccctgtttttgagacagggatcaaaacaccttttaaacgaccagttgccgatattgtacaggtgactggttgtttagttttgtttgaatacgggcattgttatagtaagtaatatagtttttgacggtttgctctacgatggtggtcgtagtgtatgtcaactcgtcaaggtagaacgtttcagactttagcgaggaatgaaacgattcgatagaggcattatctgcgggagtccctttgcgggacatactcatggtaatgcctctttctttgattttttgttgataagcatacgatgtgtacacagaaccttgatcgctatgcaacgtacatccttcaggcaaagaaggaagttggcttaacgtatctaaaacaaacgctacgttttgacaatcaccaatggaatacgcaatgatttctccgttaaataaatcttgaatacttgaaagatacaactgtttaggtccaaaaggcaagtaggtaatatccgtaactagtttttgaagtggacgatcagctcgaaattcacgatttaatacattctctgcaacctgataaggttgccctgttcgctgacgtttcttccgttttacacgacattgccaaccatacttctgcatggtacgctgcacaaacttatgattaatcttcatcgttcgattgagtaatgctgtaatctttcgatagccatatcgaaacttgtgtttatgacattgttcacccacttgttgttccatccatttttttaatgtagcccgttgtttatggtgcttccaacgatagtaagtagatcgagggatatcaagatgtaaacaaatttgataaataggtacctgacctttcaattcttccaccacattcactacaatttctggtaccacttcctttccaattccttgtacttttttaagatctcaatctgttgctttaactgccggttctctgccttcaatttagacgtctcgctatcaaattctggacctttcccatacgaatattgcttgcctacaggctgttcgaatcgatgcatttccccatttttataccatgtcatccacgtttttaattgggtatgattacgaatattcagttgtgataatacttcttttacaggtacaccagctaatctcatttcaatggcttttaactttacttctaccggataactgactcttgtccccatagaaaaaacacctccaagttattgttaggtactacatacccgttttttaacttaaaggtgttttttatttgtctcactctagggggtcagtcccgtattaaatcatccagctacatactttaccgcttttctatatgaagttttttagcatgatttattcataaaaattctcaacttcaataggccaaaaatacccatttcccatacatttagggtcaattttatttaattgttcttttaaccaattaattacggattctggtatatcgttatcgataaaagcatcttcatcatttatttgaattgccttatcaatcattcttgaatatactaataaacattcggcaaattgatttatggaagaattaataaatacttctttatagtcattaccattattaagaaacaccacattttctgtttcttttattatacatattggatcaccagaaccagttgaccctaaaaaccaatagttttgaaactcttctggcatactgaatatacttgtaatagaatttaatgccccttgtgaggaagtaaaatctagatacggtgcgggagtttcaggtaaacctcctatagataaaaactgttttacttcatcagaaaaacctgtgtttactaaagcatcatattcaaattttattaggggcccgtctctttcaacattccatttctgattaaactcttgtggtaaaatcattttctcaccttcctgaattatttataaaagtttccaatctatttgcaattttatcatctattccagtaattccccactccttttcaacattatgaataccaccatatcctggatgcaagcttttcggtaaagctgccgcttggccaccctctcctatatgatgatgcctcatagaatcttttatataatcaccgtactgaggaaaatattctatgaattgtttagcaaccacaggaactctccccctttttatcataattaaaaactaaatatttagatttaaaaaagccctttaaagccttgttataaaggtattcatgagcataatagaaagctacggaaaactttattttccatgctagcagggttatatactgtataattgaagtgtttttatttctccttaatttatttaagtgcattatgtttccaattatttttaactacatttgaatataatgaatttatattcttgaaatgaattgttcggtttcctaagagtaaatcttcttaacaatatctatctaaaaagaccattggctaatgcttagccaatggtctttttgttgggttctttattttatctattatttaaaccgtgtattattctaaatcaatataatactcattatcattaataaatttcttaaaaaaatcttctaatgagtctgctatctgagtgtcaaaataaaaaactggattattgggcaattttaaatctaacgatatatatataccctcattcacttcaaagaaaataagtttatcttcttcatctagttcttctaaatctggatcgaattcaaaaactccttctcgtaatttgacatttgctaccgttcctggtcccataattctattgattgcattattacttggctctttaatgaacccatatccaacttctaaatataactgtcttaagtcatcgggaaaacggatacccatcctgtcctccgcttttaaaatctccttttcggataaattataaattttattttctccattattaataaacttaaaatccgccattactattacctcctagggaataacattcttgatggtgctccttttccatgaatcccctgctgatgttcatcagggtatttagcaggatgaatattccaccattcatggggaccagaaaaattgttttctattagatgatgagcatcatatggctgaccaatatgtctagcaatttctccagtttgatcatatacttcctctgtatatcgtggccacttttgattagttttttcttcccattcttcaattaatttgttttttaaactcgtagtaaatctacttctatgcttagctgtttctttaggtgttaatttttcaaatttattatttcttagggactcttttaaaaattccacctgtattttgtgaacctttaaccttgttttggattcaacatccttcaaatatgcttttactaagtcacgatcaaacactgacgtatccttcattgaatcattctgtttattaactataactgattctactgccggtacttccaaaggctgaatgtttctactttcagcttcgtgaacacgattcggaccacgagtaaactgccctgtctctttatttcgataacgtttagcgtctttatcataccaaatttcgatatcattaataaactgcatcgtattcttcgctgtattttttaacacatcccgcacagtttgctgcgcaaagtctgcactcacacccaccggtgcttcctgcggtacgaatctcggtatctttgcatctaatacagcatcatacattttcctagctttatcaatacccgctgccggcatttttcgcatggcctgctggatgtcttttccgtattgagtcactttactcgtatgaaccacattgcgcatatcattgaactttttcgtgactgcctgtgcacctttttcgacaagttgagtagatgcttttgaagcaagcacgcctcctgcagcaatgccaaatgattgaaacaaactagcctgctgttgctcttttgtaagcttatttcctaatacgtctttccccattgtatactcatacatgccatttgttaagacaagtccatacaatcctttttctgtttgttcaagcactttaaacgctttaggtgtttggtaaatagccattgcatgatgcgcagcactcatgccttttgccgttttgtagacaaagcttccgccttttaccgctcgtcccgcccagcctacgaacgggatgaacccagctgctgccattgctccagccgtgactcgctgagtagcggacagtttcttatgcgtaaccggatcgactccgtctgcggctcgtttaaaatcatagtatcccgtaatttctcctgcaatgtctaatcctttttcataccatggcttattggcttgaatttgtcgttgtttttcagcttcaatagctgcttttctttgtttaacctcttgtttttgttcagcttttccttctacataacctgaagccactttatcaatttgctgctgtgttttgtatacctggctatttttgtaagcttcggcattaaaagtgagctgataagcactgccgccttgagaagtcagctgttccaaaccatttacgctaaattgaacggattcatagaaagaatttaacatttcatattcacttgaaagttgattatccagttcttctactgcggtaatagtttctgttctttttttctcagcagcgcttaactcatcttcaaaggcctctgtgggaaagggtgtaatatgtataatatcttcaatattgcttaaaatcgcttcaagttcagtgtactgttgttcgaccatttgcttagagcgatcattagtaacagccagctcttgctctaaaaatgatacgtctacaaccgtatcaccttttaatttagcttgttccgcataatctgcaatactattaaaataggattgatgtgaagatacaagacttttccaatgcgtaaccatatctacttgtgatgcataaaagtcttttatactgtcggcacctttcccttgaaattcatgatcgagtgtagccacggcatgaagggctttttttaatacatctagctgttcatcaaatgctttgtaagcctccactctgtcttttgcataagctaaaagcgtactggcttcatatacttttcccattacataccctcttttattttatgattaatatatctctggtttgagtttttcctctattatccattataaaactgctaatacactatctaaataggataataatcccttttgtaagctagttgattcattaaaaaggatataacttcaaaataaaagataatagtcataggtataaatatttactttcagtttgaatgctaagcaaaaatactttacttaaccattagatcgcattgtttctaattactttcttacaaatccctctaatccgaaagctaatttacagtataccatcctattattctacaaaaaaagctatattcactctagaaatgcttgttacactctgactatacactgcagaaaattaacgaaaactgtcttcctcgtatttttttatacttgatgaagttccttttggcaattctcacctctataacctaacttctacataattagtaaaagggatactcatacctctccaacacatcaaataaacatatacagaatgatacctctattgggattcgaaaggagaaataacctttgacaaaatatagaattataacctttgatggaggcggtactttaggtgctttaagtttacaacttttgaatagattggcttatcaaaaccccaagttaattagtgaaaccaatgttttttcaggaaattcgattggttcatttactgcccttgcactagcaagtggaagatcaccagaagagacgtttgatttttttaaagatcaaatcttaccggcattcagtgtttcacgaccgggcggaccggtttttaaccaacaagtaccctattctggtttgattaaagccatacgaacgtttttcccccgagaccttcgccttagagacttaaagaaacgaatcgttgtgcctgcctttcatttgtttgcaccggaactgaatcgttggaatcctgtgttatttcacaactttctaggttctccttatcttaatgagaaagctagtgacgtaatacttaggagcagcgctgctccagcaacgcaaagagcttatcaaaactacgtggatgggtatacagtagcaactaacaccagtacagctagtatcgcgtttgcagtcggaaaagcaaagcagccgttagatcaaattgccgtattatccattggaacaggtgaacagccaactcaattaagaagagatacaaagggatggggaatggttagtgccgataacatacgccctgaggatatggaggacctgcctccgaattggggagtgcttttagaccgatcgcctaatgaaccgttgctgccgtttcttcagattatctccggtggatcgagctactatgaatcaatggtcagctctgagcttttaggcgatcagtttttccggttgaatccgcgaattcctaatttctctaaaacggacccttcggttgttcccgctcttatttcaattgctaataaaacgaatttacgaccggcatttcaatttatagagagaaactggaattaatatgaccgtactttagattaatttcttgtttctatttgaagtatttaaaactttatataacaagatatccacgctggcagcgtagaggtcatcctacgctcaagcaattcaaccaaacctcttctctctcccaaccacaacaaccgctagcttcccaaaaggaactagcggttattcataatctctcagaaaccattcactcttccaccggcttctgctcatctgttaacgtatcaattttagtaatttgaagtttgtctttgccaacagctttaacatgataaattcgttctttcttaaactgcgtgcttgcatcatatgagtcggtgaacgtgtatacttcgtttgtataaatgtcgtaggttccgtcgtcatgtgattctgtctttttcactagaaactgatcgttagcaaacgatacgttttttccggcgagtgatgtgatatagctttttagctgtttataaactggctgacccgagtcaatataaggcgccatcccactaaagtctccgctgtttaagcttgaaaagtaagcagctttataagaaataaaaaagttttcaagatccgttttgcttacagtagctggtttgacctcttcattttttaacagtttcgtgctggccgtagcttttacgtctgagtctgtttctaacgtttgattgtcacgattcatatatacaatcgtcagcaataagacaagggcgatagcgcctcctattaaaataggaaaagtgcgtcgtgatgattgctgctttttgagcacgggaaagtctgcgtaggatggcagcgtaacaggttctatatctacctttaaccgagctagtggctttagcatctccgttctttttatactgttaagcggctgaagtgctaaaaattcttcatatgtaacaataaattcgtttactgctattcctttatacatgccgtaaattcgattccacagttctcgacaccgagtatcctttatatcttcactcagttcgttaaaaaatggtcgtgattttttaataaaagccgctaaccacgtttgatgaacgtcgactttgtggactgcatgtaggtcgttaagtgattgctttaacttggcgtgttcatgtgcatcgttttggataatggcttccatgctgcgttgcgtttctcccagcacagtagaaagactcttactcattttttcttgcagcgcatcaaactgactgcgaacatcaggccagtgcagttcgagtaactgtttttgtgcagtcgtggcttttcgaatactttcatttagctcatgctgctttgtgcgaaaggcggtcgctttttgtttggtcactactttatttttgcttagctgcttccactcttgctttaagctcttgtcttcttcaagtactgcggctatcgcttgttttacatgttcatgctttttttgaaattcaacaaacgctgacaaatacgtattccagttttccttcatttcttttaacgatgacgtgttagcatgtttttctgttagttgaaaaaagtcgtttctaaacgctaccatatccgcttcggaagaaagtttttttccgaaaagctctgtaacacttctatgtatgcttgttaactgttggagctgtttcatattgctttgacgcttgtttatgtactccggatagtcgcttgaaagaaacgtcaccattgtatattcactgttgttgatgttgtactctgtccgttctttttccagttcgtcatacactttctgcagctgacgttctactatggagagaaatttttctttgtccatcccgtctacttcttcttttagcatgtttaaagatttcgtttctccaataagaaattcgttttctttatatagctgtatccatgcttctatcagctgcgctgctgattcattccagtggcttgtattcatcgtttgcttcacctgttgtttttatttttatccttttttaactatacaggaatttaacagaaattctattacagttttattactcttgaaaaatcaggttcaagctttctagagccgcttctagcgtttgtttgtctccttggtcgtagctgtgcgccacaagtactacggttgtaaatacagctttccattttgccagtctgtgcgtttcttcgtctacttttccgtattcttttaaaaaacgtgctcttcctttaggaggtaaaaagctgtaggcaatcgctaggtcaactgccgggtgaccaatatgaacatctccccagtcaatgatgcctgaaaccatattggtttgatcaacaatcatgtttttaatatgaagatctccgtgaaccagtacgtttttttcttgatagtgaatttcttgtatgccatttacatagtcttcgagaatttcttgttttgaataaagactacgctctttcatttgcttgacatatttctctagcgccggctttcgtttcatcgtatcaagtcgattcaactcatcaaacggcacgccgagctcttgggcttttaaatgaggatagtgatgcagcgtacgaagaaatcttgctagtacagaagcggattgtatgcgctcttcttctgttaatcttgcaggcggagttccttgcacgtagtgatatcccgtaaaaggccaaggatagcctgcattcggcttaccgaaaaaaatgggctctgcaatcgatagcggcaattgagaagcaaggcttggtaaaagctgattttctgtttttaatagtcctactgcaagttctcttcttggaaaccgaaatacaaagcggtcgtttacttgatagaccgtattgtcaaagccgtagccaagcagtgaaatcgcagcgggcgcaagttctggaaactgcgtttcgattagtgttttggcaaacggtgctgatacgatttgttctgcatcccatgcatttggcactgtgatcacctttctttgatgttgattttgtatgtaaagtatactataaaaatgaaaaaacctctgactcgttgtcaaaggttttttcactatacgtattagacattcaccgagttaaaaaactgcggtaaatgagatttatgcgcgtctagcatttcgtccaagagctgcttggcaatagtatcagatgggactaacggattgattgtcattgcaacaagcgcggtattgtaatctcccgtaacggctgcttcggccgccactcgttcaaaagatttgatttgctgaacaagtcctcgaacagctacaggtaaatcaccgactgcaattggctttggcccttcttttgtaatcacacagctcacttcaacagcagaatcatttggaatactggcgattgccccattgttaatggtatttacaggctgaatatcgcctttatcattatagatagatgaaattaagctgcaggctgcatcgctgtagtacgcgcctcctcgcttttgaagctgaggcggtttaattgcaagattaggatctttatagagctcaaataagtctttttctaacgcgcgcactacttcagctcgtgtaccttcgagctcagctgcattttgttcttcttgcagcatctcgtttgttttatagtaatagcggtgatacccgcatggaataacccctaggcctttaataaagtcaggatcccacgaaatccctttgatatttcgcatagacatcgcattcgtcgggtctgccatagcgtcaatcacttgatcttttacgctcactccgtctaaaaagacatctaatccaaagaccatatgatttaacccggcaaagctaacttgtacccggctttcgtctacttctagcgctttagcaatccccatacgaataccgattggcacgttgcataagcccactacttttttatgattgctatagcgtaaaatggcttctgtcaccataccagctggattggtaaagtttacaagccacgcatttggacatagttcttctatatctttcacaatacttaaaatcacaggaattgtgcgcagccctttaaataagccgcccggtccatttgtttcttgcccaatcacgccgtattttaacggaattcgttcatctttcattctggcgtctaacaatcctacgcgaaattgtgtggtgacaaagtcggcatcttttaacgcttttcttcgatccaacgtaagatgaatatcaattgggactcctgctttttcgaccattcgttttgccaggtttccaacaatctctagcttttcttttccttcttctacatctactagccaaagctctcgtacaggcagctcgtcataacgcttaataaatccttcgacaagctccggcgtgtagcttgaacctccgccaatggttacaattttaattccttttgtcatttgaatccctccgctataatgaatgatttaaaaaatacgttatacaatactttgctgttcttcttttaccggtgaacgatcacgatctatagaagctccagtttcttctataagcttttgtttgtcccacattttaaagaatggaaaatagacaccaaacgataccaccattagcacaagctgcagaacagcccctgacacacttcctgtaattaagtagccgctaatcaccggcggcattgtaaacggcgttacaattcctatcggctttgcaacgaggccgatatccatcgatacatatgtaatgatgaccgatagaagcggcgctaaaataaacggaataatcataatcggatttaatacgataggcattccaaaaataacaggttcgttaatattaaagaagcccggtcctatacttaatcttcctagttgcttcatttgctggcttttcgcaaacagcaccatggccagtacaagagaaagcgtagtgccggatcctcctacaaacacaatatcgttaaactcattcgttacaatatgcttcactggctcaccagaagcaagagcggttgcgttttccgttgttagcgtaagccatacaggcgtcatgacagaaccaacaatcgtcgcaccgtgtagccccgtactccacataagagtaattaagataaaaatcagaatcgtaccgactaagcttgtaccaatatgagttaaaggctgctgcagtaaaaccgtcacgacattatgtaaattcccgaagtctccgacgttttctacaagcaaacgcagcatccatataaccattacagcgccaaaccctggtattaaagctgaaaatgaacgggcgacagctggcggaacagtttctggaagcttaatcacaatatttttttgaataatcttccggtaaacttctgtggcgataaccgctatgaccatccccacaaaaagacctttactcgtgaacatcgccgtttgataagctgtttcgaccatagccgttccatctgcgttttctccaatcgtatacgaaacaaaaggtgtaccgacaaagaaagcagctaaagacactgcacctgaagcaagtgcatccactttatatgattctgctaagcgataggcaatcccgaacgtagctactaaagccataatttcaaacgttcctctgtacgggtataaaatgcttgcttttagcttagaatgttctgttaaaaaatctgtgtaggcttgaaaaggtaaattggctaaaattaagaaaagtgaaccgataataataagcggcatcgtcaggaccataccgtctcgtaatgcttgaagatgacgctgctgagcagctttgccagcaagcggcataatatatgtttcaagtacacgattcattttgctcaattgattccctcctatttcgaaactaactgctcagcagattttagcacttcttctccgttacacattccgtaatgaaccggattaataacctctactggaattcctttttcctctcctaactttttcatttgaggaagcaagtagcgcacttgtggacctaaaagtaaaatatctgcatcatcaatatgatttctaaccgcgtctcctggtactgcccagattttgcacgttgtctctttttcttttgcgcttttttccattttagtcactaacaaacttgtagacatccctgctgcgcagcatagtaaaatattcattttcaattcccccttgatcagtaattgattaacatccataagtaagataattatcttgctaagatgttttcttgttaccttcactatatattgaaaacgctttcaattaaacgcaatatttttccgttaccaaaggaaaaatattgttagaatattcttttaatttaaagaaaaagagattgtaaatcaaaacagattgtggtagctttttaaaaaataataagcagctcctccatctaggtaagctgcttagcgcactttattataaccccgtagaaattgtctcctgatgtgagattcctaggtggcggtatgagatggttacttcctgtatacttatattatctgcaagagaaagcgcatatatctgatcactttctttttctttgttcaatctttctagctgttcgtcagggcctgtatgcggatgcaacttcacactttgcaagttcttaaacgtatagccttttgtttcttggctagtaaagtctccaagaaggaacccttttttatcattgcttacttgtatttttgcatattcgggtgttttgtttccgttgatacggatttgttctatttgaatatctcctagagagcccttattacctatagaaatcagctgaacttttttgttcttggcaaagccagcggctttagcctccaacgatgcactcatttttacaaatgtatatactccaacaaatacgacaatcaagatactggctataagaaaaatctttcgcaaaaaaaacactccttacctttctttttcgtgaaatacagcttccgttcattgtctttttcatatacacgcatctgcaaatctcttacaagctcctatcaactcttcttttttagcaagctgacaaacccactcttcaggaaggccatccagctggtaatatgctcctgccatagtacctgtaataaagcctattgtatctgtgtcttctcctaaattcacagcagtaagtacagcttctttgtagtcatcactttgcagaaaagaccaaagagatgcttctagcgagctgacgacgtatccagttgacccgatttcatttcttgctgcgtgcggcaagcttaggtttaacactcgttcatacgcagaaaactctgcttcatactccgtacctgttaactgcttttgacagagatttaccgcgttttcatatgctttaaaaggctcgttgccgtcaagaagacgaataagcagctccacgtatataatgcagccaagcgtagagcgcacgtggcggtgcgtgacgtgcgcaattctttctatttcttcttttctttttgtaaagctaggttcatcacatagtgtaaacgcaagcggagcaatacgcataagcgctccgtttccgttgtcgtattcaccttttcctccccactcttctttaggaagcccgcttttatagcggcgaatcgcttcgcttgtggcgatgccaatatcaaacatttctccgtacggcgtccagtagccattcgcccaatagctctcaaacttttgcattaaatcatattcatcttgtttttctagtagattatcaatcaagcacatcgttaaagacgtatcatctgaccacgttccttcaggctggttatacgtaccgtagcctgtcatagccgtaattcgaaatgtatcgcgttttttaaactcaactggaacgcctaaagcgtctccgacagctcctcctagaatcgtagaaagtacttttttatgtagcgtcatgtaatcaactcctttctattattgtaattgtttgattttggaatttgcaagagatctcttgcctagacgttttttcttctttttacaaaggaatttacaagccttaatctaatttagtaagaggtaaaaaaaacatgtgaagtgaggtgtggtagatgattcatttttttgaatataattggcaagtgagagatgaatggtttagctggtgttatcaattttctagagaagaactgttgaagaagcggactggaggaacgggcagcattttacaaactctttttcatattattgatgtcgaatacagctggatacgtgctatccaaggtaaacaagatatcctgctttcttttgaagaacacgatacgcttgaaaagcttcaagcgctctcgtctgcacatagacctgacattgccgactttctaagccatttgaatttttctaacaaaaggtacgtaactgtcccttgggattctacttcttacacggaagccgacatcttgcatcacatcatcattcatgaaatccatcacatcggtcagctttctatttgggcaagagaagtgaataaacagcctatttcttctcactatgtaggaagaaacataaaagacattccttcatacttctctaaaaacaattgaccaataaaaacaaacgttctatattaaatatatggaggtgaaaacgacgagacctgaacttacaaaagacttacctatcaaagactttaccgatttttactggctcaaaaccgagctgcagcaattttgccgtgaaaacaatatgagcccgtctggatctaaaatggaactttcaaaaagaattgaagtgtttttaacaaccggtaacactcaacaatcaaaatcaccttctaaaagacgctcgtcctctaaaacgaaagcgctgctaacattagataccgtcattggggaaagtcaccgctgcagtcaagaagtacgggtttttttaaagaagctattcatcctacgtttcatttttccacttatattcaaaactactttaaagaaaatgtagggaaacctatcgagatgtggtaaaagcgtggcatgaagaagaaaaacgaagaaagcagccttcttatcaaaaagaaattgcgcctcagtttgagtacaaccgctttattcgcgatttttttaacgatccgaaaaacaatggaaaaagccgcgatgatgcaattgcagcgtggaagcatttaaaagttcagcctggaagcaatcaataccgctcttaaatcaaactctacataaataaagaccattaaaacaccacctcaagaaaaggtggtgtttgtgcacgcctgtagatttcttcacatacgcatgtgctgtttattgcggcgtaaaatctttagctataaacagactcttttttaattaaaccaagcgtctgtgaagtcgacgcatgaatttcgttaaaaaagtctggatgatcaactaacgacatgccataggaaggaatcatttcttttatttttggctcccacttgttcatgttttctgggaagcatttttccaatacttctagcataacgtgaaccgccgttgatgcaccaggagaagcgccaagaagtgcagcaacagaaccatcagcggcacttacaacttctgtaccaaactgaagcgttcctttcccaccggcttccgtgtctttgattacctgcacacgctggcctgctacaacgatatcccagtcttcgcttttcgcgttcgggataaactcacgcagttcttctacacgtttttcatttgataacagcacttgctgaattaaatattttgttaacgccatttctttgacgcctgctgctagcatggttaaaatattattcggctttacagaactgattaaatccaagtttgagcctgtttttaagaactttggtgaaaagccggcaaatggaccaaacaacagcgtctttttattatcaatatagcgtgtatcaaggtgcggaaccgacattggcggagctccgactttggcttttccgtatactttcccgtggtgctgcgcaatcacttcagggttattgcataccataaataatccgcttactgggaatcctccaatatgcttggattcaggaatacctgttttttgaagtaaaggcaagcttccgcctccaccaccgataaagatgaactttgccgtgtggtactcaactttgccgctgtttacatcggcgacttttacttcccacataccgtcacttttacgtttaatatcttttacacttcgtttgtaatgaacgtgaacccctttattcttcaggtggtcaaacaacatacgtgttaaagcaccgaagtttacgtctgttcctgaatcaattttagttgcggcaattggttcatttgacgtgcgccccttcatgattaacggaatccattcttttagtttgtcaggactgtcggaatactccattccttgaaacaacggattgtttgacagcgcttcaaaacgctttttcagaaacgatacatttttttccccttgtaccaaactcatatgcggaattggcatgataaaatcttgcggattgcgaatcaacttgctgcttaccagataagaccaaaactgtcttgatagctgaaactgctcgttaattcggatcgcttttgttatatctatagatccatcagctttttctgatgtatagtttagttcgcacagcgcagaatggcccgtccctgcattattccattcgttcgagctttcttcccctgcgtctgcgagtttttcaaatactttaatgtcccattcaggtgctaactctttgagtaatgatcccaaagttgcgctcatgactccggcaccaattaagataacgtctgtttttttctgtacgttgctcattataaccttcctcatcccctatatttgtaaaaagatgtaggcgctcctgcttacgtagtaaaaaaattcaggtgcgacctaagaacacacctttttctgtctcacttataactatatcacagtataattgtctgatgattataaactattcaaaaatgataaaaaagtgagaaaatcgcccacaaattccaaaaaacttattaaattacgtctgcattttcttttattagtaaacttttatacctacttctaagtggcaaagcattgattaataaaataacaaactattccaaaaattcagcttaaaaaccaaaataactgccttgaaaatttcacctactataactatactcatttgaaagaacaaacagcactataattagaaatgccttcattctttttgactagttatacgtagatgtattcatatatgtatagagcaccggctcgtccaggtgcatttttagaaaaataagtatatattgtaatgactaattttcagctcatattgcaagttacaatatctatgtcatataacataccatgaaataagtgaataagtaaatgattattcagaaatttatgttataaaacctaacatgtatgttgacttttacatagactatatttgaatatttaaaagaaaaccctccaaattttgacgagtgacatattgttatacgctcgagcatttttttgatgaagcatttccacaaaaataccccttagagactttagcaaatcaacgtgcacttacaaaaagcttttcaatcatgtaatttacttaaaaaatccgtaaacgtatctgcgatgtaaaatacattgctccttgcacgttcttccacttgttcttcagttaaacctttctcttgcattaacacttctttttcaggggcattttcgtgttcccaaaataacacaatcgggttgtctatattatttttataatctaaacaaattaaatttccagcgggatcattcgcaataggaaaaacctttttcggaagcataggtttatatagttcatattttttaacaatgtactcactgcttttcttattaaagctaaataaactaccaaaacaatgctctacgttgcctacattaaattcttttggtaatacgctagcacctccatttatttttacacaatcaatataatctttaggtaagtggaatcctaattgccttccactttcttcaacctcattttctgatacttctcaatcagcatattcccactctaaatcttttctcatctaattcctccttataaatacggattattccataactccaatcagaaatggatatttaattcttcacgaatcgatttttctaaatattcttcaaagcttcctgctataactttttttccgccaaagtcaaaatcaactatgacgatttctttattagggtattgaaagcctactggatttcccgcactgtctactccaatcacaacaaaatgctcgtatccttgaggcaacatatttctgaactgtagagatttatctacaaatgacggtgtagacacaaactctgcctctcttaaccctaaaacaaccgcttcaccaattgcccccgaaccatacctcaaaggaaaccttttaaaatcctctggtaatttcacttttagcttcgcttcagcttgtgtcacttcctcactagtaacagcaccgccaaaagcttcagggtacctttcaaactcttggtctactgcatttaacaattcaatcttcatttcatgccttccctttctataggtggtaatttaattcttttttgtacatacttttgttatctttgtaaacgcaggctagaaattaaatcttctaaggagcttgcaatttctttcaagcaacctcgttcaaaatcttctaattcaattttgccgctgaggttatcaatcacaactaccaagccattgccttctatacctataggaaccttatcaagcttatcgtatcaagcttatcgtgatttattttatatccctttaagttcctttcaaacgtatccaattcaatatttggtaatacagcttctagcgtgagataatagctatccataaaaccatctaactccgcaaaccagtaggaattaaaatagcagtcaattgaagaatgaaatgtaatatcaaacctttcttcaagtggtgttatatcgctatgattattttttggaacagggttccataaaatttcttcgtcttcatccacttccccttgataaatcattgattgaacattttcgttgtaggttgttttaaataggaaatccaaacctttttcaaaatattctcttcttaccttaaaatagttgctcatagcatctttcattgccaataacctcaccttcacttaagactttttctaatcgttcagcatatgttcgttctgtttctttacgccttgttatctcggatgaattaattcgtctaaaaaatccttaaaactatgggctactttatatgtattttcttcttcacaagattgggggaaagaaagagagtggtcccagtaatacacaccgtgcctttccgtatcagtaataagtacaataagtcccgaaccaggatcatctcctattaccaaactacacggcagcatatcttcttcaaactcttcatagcatttaattaaatcaaacgttcttgttacacctatcccacacaaaacatctaaaggaatttcttgatttaattcttcaacaaaaaatttactatatcttactttcgaagttcctccgttatattcaactaaaaattttttataatcttccggaagtaaaaaccccaaaagttcttctaatttgcctattgattcttccgttgcttgaccaaaggcatttaaattcatttgataactatctggcaagtttacgttgatcgtatcttctctcttttttatttcatcaatactgactccatcagtcaaaaagacagaatcattatattcgtttataacctctatgttttttcttttttcatgttacttctcctttcgtgccacctgttacaaccattctttttttatatgtaaaatgatcagtcctcatataaacaattaagaaaatcgttgaagctatttgacaaaaaatatatattttccatttcttcagtttcctcacaatgagcccaatgatagacttgtccgaaatactgtttgctgatcccaatacatatttgattcccgcttgggtcatctgctattggcataaaccctgcttctacaatttcatcgaaaagatcaaactttttctctaaattgtcatacatggttccaattccataaaaaatgtttactatactttcacccagcttttcagatatcttataaacacttggatttggataaccaccgttatattccagtaaaaaatctctatactctcttggaattgtaatagaatgactatgctcaaatcgttctaaatcttcaatggataaactttcatgcattctttccattttcactaaaactcactccttattgattagcttcttcaccatttcattgctatttctactatatagatagtttaaaataacatttactaataggtgactgaacgtttaaaggacaacgtttttaaccttgtcctttgattactgatttattttattaaactagtgatttagaaaaaccggagccttagaaccagcactaacagtttttcaacaatagcttgatttgctgagtttgagtagcattcacccattgtggtttcaggctttagtacacttcacacttcttatgactaagtgatggattccattttttcctcaatccaattcatagctatttctgcatcttcttgagaaatgactcttttttggcttttatgcttatatgtttcataagtccacaccaatataattttaacaaactcaactgtttctaatttacatactggttcaacctcatcttgctctttcttcttttaagaactcttttaatgcctcttctgacgaagcaatatcctgatgaaaagtcccagctagaaattaaaaaacaggatcttctaatttattagaataacacatacgatgtatcaccttttactattaatttaccgccttttaacatttcgaacttggggtataaattgtacattcaactaagcgctgcagaaaaggcagacttcagcatagtattaaaatcttcaaaggtttccatatgttcacctgaaggtttgtctaattctacaaaacattttttagaaacattataacaataccaagctatatctgaatcgccaaagaaaatcagcttatcttcatccataattgacttccacgtttcattagcatctaaaaaactttccacttcgttgatgggcttagcttccaagaagtctgggtccattccgtatattattagtccattaaattcaattccattaacagtttttaaaaattcacagtattcctgaggaagtacctcctcaccaaatttcccttctacatatttacaaaaactcgataactctttttcactgctaggtaaattgagttttttattccacttctcttctagttgagaaatttgactaacttgatctctccacacaaaatcaccttcccatctatatttaatttattccttacaaatacagtccttattgttactttagtttttatcaccgatttactggttttcataaattttgattcagatgctgagctattttcaaatatacaatttctacgttacaaaacttgaaaagcatttagccaatcaaggtataagtttttcatatatctaataaagtattcacacctacattatttactaataattcggttagagatggtgcaattttcactgcctcctcaatgtcaaaatccgcgaatcttgtatagtatatcccaaaaccatctttaccctgtagatagattaacgcaccacctccttcgtcatcaccaattgcgattgaattcgggagatatttctgtacttcataagcttcattcatttctatgcaccccgatgctccccaaattcgaatatacatttggtcgctaacattaatttcaatgtctgaagccagctgaattatttctataaattctgtaggtacatctattgtcgaaaagtcctgtagtgctttaatttcttcttctttcgaaggagattttttagcatcaattgtgtacatactactgatattatctagtatattcattaataatcaatcctttcatacttaacacctagtttatttagcatcttgtattgttgttcaagaacttgactagtagtattacgtgaaaaaccagctttagttaaatcgtccaccatgaattgtaattcttcctgtaatccatgatgagattgtaatttcccaccatttggaccatctcctttaggtttaggtaaggaatccttatgtgttttattaaaattaacataattaatttcagccgtccccttagaaacagccgccttaccaccaggcttttccaccttctccacagcttctgactcaaccttgaaaacacctttaaccttatgtttggttacggtcttttctgctttgtttacgcgtttgtttacgcgaagtacgtattctgctccttcgcttccgtatttcaccgttttccctggcactctcgcaaagctgcaataccattcctgctccagaaacagaacggtcaaaatgagagagttcatcgccagtaacaggatcgtacctacttcccatccaccttttacattggaaatcaaaggcaccatatcgaatgcaaaagaaacagttcctagaccgtccttttgttgcttttggcttccgcttcatatacacttcttgcgatttcaggctttgtataattcggatatatctataagaaatacttatttaattttaatttcactatgtatggaatttaagtaatacagttaatcactatgtcaaagaaattaaaaaatttataaaaaacaaaataaaccttgaaaggtaatgtagcccatcaaggtatatgtttagagtaacgtttttattttttaatattccttttccatacactttctccgtcagttaaaaaaactgcacttggcggatcatcataaagtgaaatttcaactaatgaacctttcttttgtattagccaattatataaacgactttcctcactagtaggatgcgctaaaatatcatttacttgaaatacagctgcatcatattcggtataatttacatcgtcgtcatctaacctattatctgtttcaaagactgtatctagttcacctacaatccttaatccattttcccattctagtatcatgtcactatgttcatattttattaatgttcctattaaagagtcataccccatatacatcctcttttcttttgtttttacggccttgatggtactatacgagctccatctttgccataatgtatcaatccattagtagtctcaaggtattcaccagtatttcgatcatagtacttcccaatagttttaccaaagtctactctttcttttttaccgtttggcagtagttgacctttccctgcaaacttatcaagcaattcttgtgctgttttattatcgccatagaaaatactcttgttttttccatttgctatttcttgtttgaaatttggcgtattaggaatatgcttttcttgagcacctggctttactttaactaggaatcgattaacttctctataaggtccgataggtactgaattctttccctaagaaggtaaatctttaaccgtacccttgccacaaagcttttccactttctccaacgttttcaactggccttttgaaatacgtcttcgccacttctactgtctgaactactttttcagcttaatcggttaaattaacattttaagtctaatatatagttttattttacaataaaaagcacttgttgcctttaatcgacaatcaagtgctttaagttcatctgtttttaagtagcttaaacttgtaagttttgtagtaacaatataacactttctatgtgtcgggataatcactaacttaaagcttacgggtttgtacgagttcgttagttttatgtccattccatgtgtctatattcataacccagtaaaatgtcatctcgcctaagctcgtactccgtttttctattctatcattacacacagtactccctgacggtacaaccatcatgagtttttactttttaacagcctatttcaaattgcaacatcctggtaacctacttcagctactttttcatttaataaacgaatccctagcccattttctatatcccatgtacaattaaatgtaagtccaatatctcgaccgtcaaaagaacctacatagggaacaactattccatctaaacttatcatctctgatatttcattagttgtttcaactaatggatagttttcatttacttcaatatcataacctagatcctgacgctcttgtttgtagtagtctaatatggattgcaaaaggctttgttgtaactgttcccaattttgcataagtgaagtatatgctgcatattgttccttatcaaacttaccatcctcagcaccttttaccattagcgctatctcaacttcatggcctaaaaagacaatgctagtatccttagaccaaagcaaatcatattcaagctcaccaaaaaccgcatcatttattttcatcttatttctcctttttatttattagcaaatcctcccggcttaaacgctcctgcatttatctctcctactccaccaagatgaccaaatcttttatttatctctgtcggtacaagttgcattattttcccatcatttaattcatgccatgttaatttatttatcttccgatagttttctacttctttgatagtaaccctacctggttccattccaaattggcgtgttaattcatctgacttatttaacttatttgccaactgctgatctgcttgagaaaaattgtaagtcctagctttcccaccataattcccacttcctccaagcatatagtcaatttcaatttgagcctttgatactggcgaaaaatcaggaactccatttttatattggataccttcaatacccgcctcatcgaatatacgtttcaattttggatctggtggtggtttaagtgtacataaagattctcctctgattctttcaaattcaacccttggattaacctgtgcaggcgtctgattaacccttgattcataggaactagcaaatttctcttgcttgaaggctggcggaatgtcggcactactattacccgtacccttagaaacagcttcctgatcatgacccccttcaacattctctttactatcaggctctttcactttctccaatgctttggactgacctttcgaaacattccccatcttatacgtcgttaatccatttaacgcttcaccaaaggtctttccaggcaaagcctctcctatccctaccagttgaggttgaggacgtaaagtcggtatctcagcatctaataaaggttgaagcttcttctgaacaggttcatataccttcttcgaccaattgcttgctgcttttgagctgacgacatttcgcatatcgcttagtgttttggtcgctttatgggcaggtacacgcggaacgtttgttacttttggaacggattttacggctcttgcgggtttcgctcctccaattacgctcgcaaacagaaacatgctgttttcccagtgctcttttgaaagaggtttgtccggattaagtgcctgctgccctacatctaagagtcccatcgttgcgtgattgacaaagtcatacggtgaatcaaacgattttccccctcgttcattcaacacctctttgaaggaaacagcgccatcaaatccacccatcgttacaaagtttccaaaatcatataaggagttgaactgtttatctcctctctcccccataccggcccaaacgtcttgtgctactcctttagtacccgtaactgtgccttttgctaaagttatagcaccttctcctacgtccttgactacagcttttataccggtttcttcttttttagctttaggattttcacagatttctgtaaagtcaaaggattcagctgtttttttagtcccaacactcctaacctgaccctgacgcatcactgactgcataagcattccctcaacgcccgtagcgttttgaagaacctgttgagacgctagcatgcctacagttgaagaatcgttgagcgcctgcaggtatggacttttttccagttccgctagttttttcatgttagcaggtgctgtatcctgctgaatttgcgttagcacttctcttatgtaaggcgagtttttttcaagcttgtgaatttcttttaactgttcagcaggcgtcattgcttgaagctgaatcagtttttcaaggcctacttcctttatcactttctcttgtttttcttttcttgtcaaggttgttggaatgcctttttcaaaaaccgagacgcctcctgaatcggtcatcgcttttttcgccaacgcgctcagctcacttacattgcccggctgaatggaaccattttgaaacccagctttcactttagaaagcatcgagtttaaagatgtcagctgatcttgaatgactgaaaggctttgcgtttgctgttcgtcaaaacggactaaatcgttcatcgttttgtccgctttgttttttgcttgttctacttctgttaaaaaaccttggtcgttaagcgctgaaacagaagcaaggtgactgactttttgaatcgctgcattcgcttgatcgacaagcgaaacggttgtatttcttgtttgatttaaatgcgcaggaatagtgtcttgcagaaacggctgcgtaatgtagccgtcttcgctcggttcgaatgagcgcagcgcatgtgtgatttgagttaatcgagcttcataggaagtgagtaatgaatgatacagcgttaaaaaagaagcatgtcccgtttcgtaaaaagaacgaatcgcttctcctccttttcctgtaaacgcatcatctaagcttgaaaatgcctgaacctgtgaaatcaggttctgaatttgctctttttgacttttaatagagtctaagatagcttgaatattttcgtgaaaagcatcgacatcaagtgttttcaataacctgtaacctcctagctgtatcgatgtagaaaaacaacaaacgattaacgaacaatcgcacgtcatttttctaaacctaagcggacgctcttttttacaaggcttgcatcatccgctaaataaaacctttttatttgaatgccaaatctatgctggttgaaaggttgtttttgatagctttatataaaatatgaacattatttagcagcgtttgcagctttttcatctgcttcttttatggactgcacggattttttggtggcgttcaaatcatcgaggagcgtttgcttgtagtccacaattaacgtttgcagctgctggttcagctggtttaattcatcgagcacctctagttcttgtccgcttcctacgtgaaatggaaaaagcggctgaaactgctgcgcagcagcgcttaggtcactaagcgttctattaatttcaccatctattactttaatttcgtctgccatattgcatcacaccttatcttttgcttcgtcttcttgcattttaatggcccgttccatcccttgtatatctgattgaagcgccgtaatttttgcatcaattgtcgtaagggcatccgtcagctgacgggtcagcaaatcatcgtattcgtctaacatagcggtgcggatgtcttcaaacccaacagcaaggctgcctgaccaagtggcggaagtaagctctgattcttttaccttttcctttgcacgttcaagctctcctttgacttccgttaacgtgtttttactagtcgtaagctgctggatatcttcatgtgcctgcttcacttgggtatacagatgagcaacaaacatctcattcatatgatgacacttcctttatatctatctcttggatcttctaacagtaattcccttttatagcttatcaaataaataaagaaagagagcacatcggcacgttttcttatattttttgggaataatgcaggtttttagttcactacctactcttcaggataaaataaccaaaactatcttaccattgacaatttatcaagatttttggactacttcgcttgttatttccgcgccactaaaaggcctttttacacaatttttttgttaaaacgcattcattctttctatttccaaatatttaaacatgcgctagtatatacataatataaagaggaggttgagtatgagagaaaagctcgtaagactcggttatttactggggttggctcttgttttgtccggcattttatatttctttgcatcgaactggcaaggctttgaccgctacactaaaattgcgctgagcgtggggctgatgctgctgttttacggaagtgcatttgcagtgcgaaagcttcttcctcagcaggcgtttttaagtcactggacgcttttggccggcgctctttcatttggattaagcatcgcgcttctttctcaaatttacaacacgcacgctgaatcgtactggctgtttttaatttggcttgtgccggttactttgtttagcctttttacaaagtatcagccgttttacgtgttatcgtttgttttatttcaattcaccatggcttttttcatttcaccaactggcgcagtttcaaagcgaggcgaacaggagacgcttttactttacgcaggaatggcgtttgtgaacttactcatcttttggatcataaaaaagaaacagcgctcgtctcctgtgatcatgtatgcggcgttttgtttgtttcactacatttttttaactgtttccctgccggattttacagggagctctagcttacggattggtcttattattttttatttgctgtttttactaagctcctttttttatttttcaaaagtgaagccgcaaaggtcgtttttagggatttccattgtggcatttgctttatttgttattgaacagtttttctcttttatttttaaacactacgctgaatggtcactgttcttagctttaggattcgtgattttgtttattggtgcaagcgtgtggtttgtcaaatggctcactgctaacacgtcagcacaaaaaacctcgctccgcgtaatcaaacgaatagcagtgattgggattacggccattgcatcggtgatcggcagcagctctttaggaggacttgtcacacttattacaggaacgtatccaacaaacggaatgcttgtgattggcgttttgctgattgtggcatgttatttaattaaagcagatattccaacggtaaaatatacgcttttaatgatgggcgtattaattagcggcggcgcttctttttttgtgaacgacattctgttttttatctacgtcatcgcacttatagcgcttttagtattcacgaagcatacgcccgttcgcatgctgctttttgtgctagtgcaagggcttctgttaataaaggttcccactgcttactatgacactatcaaaatagattatgtgctgctcgctttgtttctattaaatgccgctgtgtacgcgataaacgtacaccacgcgtttaaaaaagcagcgctgcttcttgcttttatctttttactgtcgctgactgaattaagcgaaccgtcttttttaaatattatttactgtacggtgttttttgtagtttcgactgtctttttatttgtgacggtacgaaaagagccaaaatatgattttattgtcggcatgattttctggtttgtttttttagcgatgaaatattacgactttgtgtgggatttatttaataaatcacttgtgctcgttattttaggtctgatctttcttttcctaagcagaaaatgggacctgtcaacgcctgatcagccacagccgtcgtttcttgaccgcagccgaaccgctgtatggatcatcattcttgttcagcttattacgctgggcggcattttcactaaaaacgaagtgcttcttcaaaacggaaaagaaattaagctcgctttacagccgatcgatccgcgctcgctgctgcaaggcgatttcgttgagctgaattacgacattgcgcacgttaccttacctcatgtgaaagacggagaaaaagtgaagctcgttcttcgccctaacaaacaaggtgtgtatgaatacgcaaaaatctaccaagaggatgatgactggaataagccgtatgtttctaaaaagaaagacgttgtgattacgggcagctatcacgactggggaattcagtacggaattgagcattactttattccagaaggaaccggcagcaaagtggaaagcgaagctcgttttgctactgtacgcgttggaaaaaatggagatacgatcgttaccaaagtaggcaaataaaaaaaacagccgcttcaacattgaagcggctgttttttgttttaattgataaatacgccgatggtcatcgttaaaataagaatcacaaagaaaataatgattccatagccaatccattttattcttttgggcgctccgtttacattcatatccgttatttttccttcaatacgcttttgatgttcagtaacatcatttattcattgttaggcgaagtgatattatccttcctttccatttaatcgttttctttcttttaacagctcttcatatcttttttcaagctgctgcttttcttttccttctggcgtgatagaaagctcgctaatcacttttgttaattctaattgaagcgcaagtttctccgcttcactttgctgctgtgacgcttttttgcttttacccgtgtcttcaatcgccgcgagctccgctttggactgttttaacgtacaaacatgcgtcgcaagctttttaacaaaatagcggtcgtgcgtcacaaataaaatcgtccctggataagcttttaacacttcttgaagcgcttcttttgtatgaagatcaagatagttggtcggctcatctaaaagaagaacgttataatttcctaaaaagacttttgctaatgccgttttcactcgttctcctccgcttagcatctctacttttttatacacgtcttcacgtttgaaaagcaaacgtgatagtaccgtacgaataaattgttcggtgtacggactgtcttctttaatgttttctaaaatgcttttagctacatctagattttcaaggcgctgatggaaaaagccgagttttacaggcttcgcaaccgtgataccttctgttcgctgcttaatcatattcagcagcgtagattttccagcgccgtttttgccgacaatcgctactttcgcccctggcttcacaccgccttttagatttcgaaacaagatatgattaccagctgatgccgagactttgtcaaagctcagtacctgcttgctgtgtacttggtgaaactgcgacaggtcaaaatggatctcttccatttcttttggcttttcttttttctccagcttttcaattcttgtttcaatcgctttggcgcttctatctagcttcgctttttgttttcctaccgctcgcttatgaagtctcgcttcagagttgcccatgcggctcggcgcttttttaagcgcctttgatttttggcttttttcttcagaggccagttcaagccgctgcttttcttttacatactgttcatattcaaactgctgtctttccactgcgtgttttttttgcgtcacatattcttgataattgccttcatagcagtgaattttgccgtcttctacttcccaaatagacgtacaaaggcggtttaataattctcggtcatgtgaaatcagcaggagactgcctgtaaaagatttcatttcttcttcaaatttctctacgccttttacatctaagtggctcgttggctcatcggctgcaagcagttccgcgccggatgaaagagcagcagcaattttctttcttgtttcttctcctccgctaagaaagtcggcttcagttggcacgttccactggcttttcatctcaggagaaacgtctcctgtagcttgaacatcaagctgaggaatcagtgaggaacggccatatgtttgcacaattccttgatctggactcatttttttcattaaaatatgaagcaacgtcgatttgccttctccgtttttccccacaattccaattcgctctccgcgatgtacttgaagtttctctgcttgaaaaagcaggcgatctccatagcttttttcaatatttatagcttctaacaataacataaaaaaacctccctaggatttctagagaggattagaggtcataattaggcatacgcaaatatgcaccctttttatagagtaaaaaaagggagaaatcacttcatataagacatatagaaatggcacctaaaaatgtacagactaatcctatctagacaaatgttcatttaaaataaagttttaaaagaatgtctaaaaaaataggattacttatccattgtctacggtacctttcctttcttagtataaaatgacttgcttcttacagtgtatgatgaagttttttaattgtcaatatcgatttggatgatattccctacttttcctaagcacaaaagatcctcagctgatctcagctgaggattcttttattacacgtattggttcactttccctgtaaaatcaggcagccactcgccgtgcgcttcaattaaatcatcgcacatacgaatgatgtcatccatagataattccgcatttgtatgaggatctagcatcgctgcttgatagatgtgctctcttttcctagtgactgctgcttcaattgttagtaattgcgtattaatattcgtacgatttaacgccgcaagctgctcaggtaagtctcctacataagtcggcataatgccgcttcggtctacaacacatggaacttctacgcacgcttttgtcggcaggttactaatcaagcccccggtatttaatacgttaccggcaaatttaaacggcacgtttgtctccattgcttcaatgattctagagccgtactcatgtgaacgtgtatgagttaactgactgttgttaaccatttcttctctcattgattcccaattgctaatttgctcttcgcatcggcgcgggtattcatcaagagggatgttaaactgatcaacaagatttggatatttatgtttaataaagtatggatgatattctgcgttatgctcagacgattcggtaatataataaccgaacttatccattagctcaaaacgcaccatatcgtgatgctttgttctttgtttttcttttgccagacgtttgatttctgggtataagtcttgtccatctctttttacttctagcagccatgccatatggttaatgcctgcgattttctcttgtattccttcatgatccattccgagagaatcaaataaatcttttgtacatacttggacactgtgacaaaggcctaccgtctttacattggtatagcgcagcattgcacccgttagtgttgccattggattggtgtaatttaaaaacagcgcatctggacatacttcttcaatatcttttgcaaaatcaaacaggaccggaatcgtgcgcagtgatctgaagattcctccaatccctactgtatctccaatcgtctgacgcaagccgtattttttaggaatttcaaaatcaatgacggtgctcggtttgtaaccgcctacttgaatggcgttaatcacatacttggctcctgttaaagcttctctgcggttcaaataggctttaaccgtaatattcacactatagttttcttttagattgtttagcatattttccgaatctcttaaacgctcagcatctatatcgtatagcgcaaattcaaagccagctaaagcaggcacaaacatgcagtctcctaaaatattttttgcaaaaactgtacttcccgctccgataaatgtgattttagacattgtcatcttccttcctcgtattgtttttatccttttacagatcctgatgaaagccctgcaataaagtatttttgtagcactaaaaataaaatggtcattggaagcatcgcaataatcgcagctgctcctactaagctaagattattttgattttcggcaaaaaagcttgctaacgtaacggttaatgtatgcatttccttatcttgaaggaagaaaattgcaaactgatagtcgttccaaatgtagacgctggcaataattaaaatggacgcagtaacaggctttagcagcggaaatacgattttaaagaaaatcgttaacgtgccggcaccgtcaattcttgctgcttcctcgagctctttagaaatagtggagcgaatgaaacccgcatacaaaaagattgttagcggcaaaaatgctgcgacattatttaaaatagcaatttggtatgtgttcatcatccccatatttacaaccattttgtacaggggaactaacgctgttaaaggcggtattaccatcacggcgataaagataaaatagacgtacttatttagtttcgtttggcggcgcgctagaggatacgcagccattgatcctaaaaaaataagcagaaccgccgaaacgaacgtaatgataaacgtattcataaaagaactgcctaaattcgcttgctcccaagccgctgtgaaattttcaaggtgtatgctttttggaaatacccatttggaactaaaatccccggttgcttttaaagaagtcgtaactagaatataaaaagggacaatatgaacgagcgttatacaaagcgctagaaaggtaaaaaatcgttttttccgtttatttgtatagtccatcacgcttctgtctcctttcgtttaaagtacacaagtgctgataagctaatgactaagataataagcgccatgcacacaccttgagttgctgcatagccggcgtcctgtcttctaaaatataagtcatacataaaagtagacatcgactgcgatgcatctccaggtcctcctcctgtcagcgcaacaatgacgtcaaacagttttaaacccccgataatatttaaaacgacgttaattgtaatagaaggcatgagcaatggaagcgtgatgtttttaaactgctgaagagcagatgctccgtcaagctgcgctgcctcgtagtaatcttttgaaatactttgcagccccgctaaataaataatcatcgcaattccaacgaattgatacgtattgacgaacacgataatccaagagttaagctctggagttcccaaagcattaatcttctcaaagcctaaaaacacaagaaggtcatttaaagcgcctccttggtaggcaaaaaagaagtaccagatataccccataataattgggctgataataactggaagatagacaattgttcttgttacagctttcattttaatgctttgattgagaagcaaagcgtataacaagcctataatattttgaaaaatagtactgcctattccgtagagcagcgtattttttatcacaagccaagtcgttggatctgcaagcaaacgtttatactgctggaccccaatccaatcatatgtttgtgaaaatccattccaattagtaaaggaaagtctaattccgttaataaagggatagataataaaaacggtgataattactaagccgggaaggtacatccaccataaagaggactctgtttttaattttttctttcgttttttcgtatctcttactacagaaaccggccctttcctgactaattcattcatcgtgttcactcctatttcagcttgtgttgaaaagatgcagaagtctatctccctgcttctcggcgaacaaggaacttttgcacactattttattgtttactgagacgcttgtactctttttccatctcttttgataattgctttggcgttaaacttcccgctagcaattcttgacctgtagaagacatcactgcccacatgccgctcggtaaatacttccggtcgaagtatggctcaactttaatatcgctatacttatcgtagtatttagagtagtagttttgtgttttattgtttgtcagagccgatgctgaagacgttccttcggcaatctttttggcaacttccggctgtgacacaaattcaataaatttcttggcttctttaaggtgcttagaatctttccacgcagcaagggtaaagcgctctccgccgatccagctttgcgtaccgcctttatgaatagcaggcaccggtaccgttcctacttttacttcaggatttaattctgttgcatccggtccaagagatccgcccacaaatgtgaaagcaattttattttgagccattaattccgttgcttgagatacttttgcggttaatacatcttcattcagcagccctttcttcttcatttctgccattgtttccgctagcggcgtgtagtttgaccaattaaatgttcctttttccaactgcttagcgtagttcttattttttgctgtaataagctgaggtgtagccagctgatcaaacacttgagcaatattgccgttttcccctcctggaatccatagaggcgctacttctcctttgctcttcttttttactgtttctaacgctgttataaattcatccattgtgttaggaggctttattccgtatttttctaacagcgtcgcattatagctaattccgtcttttgcttgatttaaaggatacgcatacactttgccgcttttatcttttaaaatttgatttagcgccggatccaaatgctgaacccaatccatatcttttaaatctgctacatactcactgtagcgaagctgagaccagccgtgcgtatcaaataaatcaggcatatcatttgcacccattttcacacgaagcatatcttcatagccgttacccggaaaatttgcatcaattttaatatctggattttgtttttcaaattctgcaatcgcgttttgaagcgcttttctctcgcctttattactcatcgtagaaaaaagcgttaacgttgttttcccatttccgcctgttgccgcttctttatttccgcagcccgctgccacaacagaaaagactagtaatagaacgaaaagatacgtaagctttttcatttatcttttttcctccttatactctatcaagacacaaataactgaatattcagttatttatacgtagacaaattcattgcacaacgaaataaagtcacttataatttaatcctatacttttacaaaggttcaaagagtcctagagatgaaaaagctttttcatttacatacttatctgccaataagtatgtagtttctagggctttttaacctgctttttctatggttttttctatttttcttcccccttatcactctttatgtatgaattcttcttttctatcaccccctttcaagttataacttttaggctactgttttttgagtaaggctccgcagctttcacgataaattaatttagtcggcaccatgacttttaaaggaacggacctgccgcttaaccgatctactagcattttaacagcctgccttcccatttcttccgtatatactttaaccgttgtgagcggcgtgctcgcaaatgctgcgatatccacgtcatcaaagcttacaatcgctacgtcttcaggaatctttatatttgattgctgcagggcacgcattgctcctattgccattgcatcacttgcgataaaaaatgcctcaggaagatttccttgcttaatcgcttgtcccatcagctcatatccttcattcattgaatattcaccgacataaactttctcagaatcgaacaggcctttttcatgcataacgcgttcaaaaaccgtttgacgctgatcttcaataatagaacttccgttgatataatgttctctttctgtccctccgatatagccaattcttttataaccgaggtcaaataaatgatttaatgcatgtttagtagctttctcaaaatcaatcatgaccgaatcgtacaaatcctcatccgctttgtgattgataaaaacaatagtatctaaatgattgctcacttcttgaaccgtttctggactaactcttcccactacaattactccatcaagatcctgcagcagctcttcttgcttcatgccttttagtctaaatgactttactgtaaaaatttctttttctgcgcattgactttctattccatggcgaatagaagaaaaaaaagggtctactaactcttcttcaagggattgagcaaaaataatacctatctttggagcttctatgtcttttccgtttgccgttccttttcgtatcttcacgggcgtatattgcagttccttggctgcatgaagaatgcgctcacgagtaacctcagatacagaaagcgtatgatcattatttagtactctggatacggttgaactggaaacattagcgtacgccgctatatcttttaaagttgccatctttttacctctctattataatcttctatttttactaaatatttatctcttatattggaagaatagcacattaataaaacgctttcaataaataattttaaaatttcagtaaatttattaaaatattccccaaaattcttcatttcttttgttagttccgccgttaaaatgacaaaaatccgctattactactttgtttttatcacaccgcactaaaacttaagtaaacttttagtaaatattaattttcataagaatttgttcatatttgatataaaacggtttgttggggaaaataaaaggagaaatactgataaggaaagagagagcatatgattagccaacattcttattttcaacaatgtctgcctgcccttcaacaattacataatatgaatttcacgaaagaacagctgttgcaaaaagactttttaatcggtcaagaaaaggaactaagcatgtactactcgcctcataacgattacataaatccggacgctcatattattattgcgggcatcacaccagggtggtttcaaatgaaaactgcttttaaacaatgcgtttccagccagtctcatcatcatccgcttgaacaagtcctgtacgaaaccaaaaaagccgctagctttagcggaacaatgagagtaaatttgatagacatgttagatcaatgcggaattgcaaaagccatgggcattaacggtgccgctgagttatttgcttcacagcgagatatgctgcatacaacgtccgtattaaagtatcctgtgttttacaaaggaaaaaactatacgggtcatcagccgccaattgaacgatcagcacttctttcacactatgcttttgaagtgtttccacaggaattgaacgaaataaagaatccgtgcttaatcgttccgctaggaaaagcagttgaaaatgttttaagaaaactttcaagtgaatcttcgctttctcagcatacgtatttatttggctttccacatccatcaggagcaaacggacatcgaaaacgaatatttgaagaacacctaagggaatttacggaaattgtggaggagtgggctgtaaacagaaggagttgaaaacgacctttagctctttctgtttgcaacatctccttctttttcttctagttctcgttcattttgctcttcatgaaactcttcttctgtttgtgcagcaagatagtcaaacggcgtatagtaattacgaggaagctttcggtgccaaactgttttaataataataatcatcagcggaatactcaccgttaaaatagcgactaaaactagtagcgaaaaaatcataaattatttcctcctgctttatgaaccgtgcctcctgaaataacaaagcggatcccctacacccatccacttatatttcatctacattcactgtcatcagtatacgggattcatgagtaacaaaaccgttcttttcaaaaaaacgttctggtttgccttggcctctttcagtagacacgtagacttctttcacttctttttgtataagtaactcgttaaggaaagataaaagactcgttcctatgccagtttgctgagtgttgcttaacacacaaatttcatttacataaaacgtcttatagttcgcccactgttcttcatttcctactataaatcctatgagtttattatttttactgtggaagtaacctatccctatgtaacctggagttttactgatatcgtataaacgagcataagcagtgtttatactccaaggctcattccacggtgacccactaaaaacacttgtatagatgattgctgcttcttctaattctttatcccttagtaaacgaacttgacttttcatcatattactccttttcctatcaactctcttgaaattcatttatatataaaacattccagttattggttaattataacatttatagacatagaacgaataaattagttatcgttcttcactctactaaaaaaaggagatccaatgttaggactccttttcttaaatcaactttatttctttttacttgaattaatagatgtatctataaaatcattcacatattcgctcatttctctgtacttcgtccaatgtaaatagtgatgtccttgtaaaacaactagcttttgcgacgatacgtgacttaattgattttggtaaaacgtaatatttgattttccctcttttggttctttgtctacttttctagtaaaaatcattacgggcatctttgaaggaaatgacatatcgacggttttatttatattgttgttcagttcttttgcttcatcgatgacgtttttgttgtagcctttccagctggagattgcttttgtcatttttaaattttttgttgtatacgttccttcttcggctagcggtagatactgattaggactagtaagcagggctaagcgagcaagtccacttggcgctaaaacactcatcaaacttggtatattcggcgcttcttctttaaaataatccagcgcttttggcagcgtagggtctattccaataattgcttttacttcatctggatatttattagcgtaatacatgctgtaaacaccagaaactgagtgcggcattaatatatacgggccttttatatccgatttttgcaaagcttctctcatttcacttacactattttctaccgttcgttttttattcgtaatgtcactccatccgtatccaaatggttctaccaccacgactttattatcctttgacagttcatttactaacggttcaaaatccagtgcaggcgcagtcgttcccaagccgcttagtagtacaatcgtattttcccctttaccttttgtatatacatgaatatctctgccattaacccctactaattgaccaataggcggatactttttcttttccactgccgtcattacttgattcgttacaacccaaatgatgcatatccccaatatagctactatcacattttgtagaattctcaagaacctaaactttttttgcacgtttacctctcctttccgtaagtagcagttagtaagccaacgagaatgctaacgaatctttgtaactgcttacttactatgacgcttcagaaaacgtttagttctatttcctatataaaatttaaaagaatgatagcagcttacttcagcactaaacgaaaaaaaggcctcttcttatggaagagaccttttactatttattaaaaagggaacaataaaaactgtaactccttcacttgattcctaagcgtataactgacgctacgtttttagccgttctttcaatattttcaccagctttttctagcgcttccggaagagtcactgccccaggcacgacgctgaataaagcagaaataccgtgttcatacacagcttcgcttcccgctccaatgcttcctgctattgcgatcacgggaacgctatgcttttttgctgttttggctacgccgatgggtgtttttccgtaaatggtttgaccatctattcttccttcaccagtaatgacaagatcggcatttttaatatagctttctaactgagttgcttcaatgacaatgtctacacctggctttaactccgcagataaaaatgccagcaggccgccgccaagccctcctgccgctcccgcaccaggaacgttctgaatatgaatatccatttctttttcaataaccgctgcgtaatgagctagattacggtcaagctgtttaaccatatcaggagttgcacctttttgagggccaaataccgcagatgctccggttgcacccgttaacggattgtctacgtcgcacgcaacttctactttgacttcagcaagccgagaatcgaagtttgtaagatcaatagcagctaactggtttaaactgccgcctccttcttttatttctgctccgttagtattaagaagctttgcccctaaagcttttaccataccggctcctccatcatttgtagcacttcctccgatgccaataatgatatgctttactttttgatctaatgctttaagaatgagctccccggttcctcgcgttgtagttataagcggattgcgttcatccataggaacttgatgaagacctgaagcggctgccatttcaataacagccgttttgccgtctccaagaattccgtaaaaagcttccacctctttacctaaaggtccggttaccttagcttgtataatttgtccgcccgtcgcgtccacaagcgactgaacggtcccttctccaccgtctgccataggtactttgctaatctccgcgttgggaaaatgagtttttattcctttttccagggcttcacagacgtgcagagccgttaagctttctttaaatgaatctggcgcaattacaattttcatccgcaaacactccttttatttttagccgtatagctttaatacaccaaatataagcgtggatacaattgccatgatgagtccaataagcgattcgtacggtattaattttaagcgttcttttattttcatatttacacttccacccgttgcgtgaaaaaagcttccgtgcggaaggtgatcaagtacggtcgctccggcatgaaccatagcagctccggccaaagcagaaacgcctagctctaaaattgtcgatccaaaaacttggcttgcgactgcggttcctgcagttgtcgaagcggttgccgctgacataaaaatacctgaaaccggagctaaaacataagctggcaatccaatggcagacaagccttgaataataacgtcttttagctgggagttagcaataattcctgctagtgtccccgttccaagcagcataatggctacacctgacattttccctaatccagaaatagcatatgtattaagctgttttccttttttcatcacaatggcaccaacaattcctcctgcgggaagcgcaaccattggatcaatattaaggccaaaaagcggtcgcagtgccagcagcacgatggtaacaattggtgctatgatagccgttaaaaacagcggcaagctgcttgcatccactgtatctatttcttcagcttcaaccattgttccttttttcaccaatcgtttggctattagataagtgaccgctacgccaaatacagcgggaataattcctgcagccatcacggatgtaagtggaatattgaatgcgtccgaagcagcaatagcgttaggattaggagacattaaatttcctgcctttcctcctccaatcattgctagtaaaatagcaggctttgacatacccgtacgtttagcaatggctaaagcaataggcgccactgtgatcacagccacatcaacaaacacacctactgtcgtaagaatgagtgtggctagcgctagagctaaaagcgcttttgtttcccctagtttttttacaatggtttctgctataaccgctgctgcacctgattctattaataccccggccaatataccagctgcaagaattcgcagcactgcgggaatgatgccttgtgccccttcaatcattaaagtaacggtatcagcaatattaactccgccaatcagtcctccaattaaagctccggctatcattccgtatgcaggagccactttctttaagattaatataatggcaattactaatgcacaaatcgcgcctaatgcgcttacttgaacgtccataaagcatcccctttcttgtttcttctatccccaacgctaattgtaagcgctaccttcaattctttcattagtcacttcaacaaaaaaagaccttgctatcgcaagatcttttatgcacgtgcacaattatgaaattttagataacagtagcgctacatacagttcgaggaggtcttttactttccttggatcttttcccgtgatgctttggattttatctagacggtagcttagcgtatttcgatgtataaaaagctttttagctgccgtgcttccttcgccattttcttctatgtagaccgttaacgtttcgataagttcttttttcttatcatattcctttagctttttatagtgatccaacagatcatgattttcttgaaaaccgacgcgttgacgtaacagtacgggaatttgataatccgcatagcagtagaaatcagcttctggatgaagctttgaaccgaccgcaagcgtatcttttgcctgctgataagatacatgaaggcctttaaaatcagcttgaaaagatcctgccgctaacttacacaccatcccagacgcccgaagctgtttttccagctgttccgcatagctgctagcgctgcctgtttctgtagattttaatatgaccactccgtctggaagcatagcgtataagtcattattagctatgtatttctttacaagcttcataacttcatggcgattgtcagctgtaacaatcactgccactcgtggaaggtataaattaatatcaaagcgattcgcccggtcaaaaaataaagagtcaaacggatcttcttgttgaagaagctgatgaaccagctcttcttttaatcgttcatcccattgaatttcctctattaaaatcatttcttgaaaaatcatttcagccgccatgcgcacaagctctccgtaattacgaatttgttctggcagtcctgttaaccccacgactccaacaatttctccgttaaagaaaataggcaaattcacgcccggtttggcccctcgcagcgagtcagcctgctgctgagtgatttcgtaggaactgccgctttttaataccattagcgctccttcgtggatttgattcattcgatttttgtcacccgaaccaataatgactcctttttcgttcattacgttaatgttgcaatcaataatctccatcgttctacacacaattttctgagctaattcttttgttacgtatctcaagcctgctcctctctttctttacattcccatctttttagtttctttatcaaagtagaatgatcgatacctaattctttcgctgcttgccggagtgatgaacaatgttggatagtttctttaacgagccgctgttcaaactgctccactttcttttttagaggtaaataatcacatttttcatcttcattataagtatgaaaaggtaaatgatgggcttcaattatttcaccaggaatagacacaatcatattctcaaccatatttcgaagctctcttacatttcccggccattggtacgcttctagcatttgcttcgctttatttgatatgcgcttttggacgtaatacaagctgcaaaagtaggaaacgtaatgatcaacgagtaaactaatatcctctttacgttgagataaatgcggaagggtgatttcaactacctttaaacgatagtataaatcttcacggaacctcccctttttaataagctctcctagatgttgatttgttgccgaaatgattcgtatatcgatactttttgttttagttcctccaattttctgtacctgcttttcctgtaacactcgaagcagttttacttgcaaagaaattggcatttcaccaatttcatcaagcatcaaggttccgccatcagcgagttctaacagtcctattttcccttctgttctagcgccagtaaaagctcccttttcatagccgaataactctgattctagcaacggttcaggaatggctccgcagttcactttaatgaagggctgattgtttctatcgcttgaatcatgaataagattagcgactacttcttttcccgatcctgagggacctgatagaagaatacttgtaggaaacggagctactcgtttggcttgctgataaaccaagttcatcctattgctttgaaacactaggggctgttccgacccattcacttttacagcgtatttatttgcattcatatgtgaaaactcttttacctttaacagctcttttttaactgcgtttaactgtgtaatatcctgtacagtggtaacaacgagctctatttcacctggtttgttaaacactggatttcctgttaccataacgtctcttccgcttgaaatcgtttgcataatagagcgccgttttttttcttctaacacaagtagggaaacagattgatcaatatatccttcatctataacggtttgcatatgctttcctaatacgttttgtttattggttcctgtgattttttcataaccttcatttacatatatcgttattccctttttatttactacatatattccgtccgtagagaattcaataatggcctgtaacgtttcgttcgtcaaatcttttttttctttaaaagaagtcattatttcatattcctttcttatggtgaatttccgccaatatacggtgaaacttttcaccactatccattcaatgtacaataggatttttccttctaaaagcggtgaatactttcagcacatggttataaaactccaaggaaaactggcgtaatatttactttctgaataatggcatagaaattgcagtttagtatgttgaaagaacaggagagagtctctcccccttctaaaaaggattattctctccagaatatagggtaaatgcagtacagagtcattttaaaagtacaaataaaaatcccgctacatttaggaggctattgtatgtgtaatattattaaacctaactcaaagctttatgtaatggataacggctcgatgcaaatggataaaaactggatgcttgcaatgcataacccagcaactgttaagaaccctcatacacctacggaatttgtagagtttccaatttatactgtattaatcgatcatccggaagggaaaattctgtttgatacagcctgcaatcctgaatcaatgggaccacaagggcgctggactgaagcaactcaacaaatgtttccttactcagctacagaagaatgttatttaccgaatcgattagaacaattaggggtggatcctaaagaaattaaatttgttgttgcttcccaccttcatcttgatcatgctggctgcttagaattgttcactaacgctactgttattgttcatgaagatgagttaaacggcacccttcagtcttatgcacgcaatcaaaaagaaggtgcttatatttgggctgacattgacgcgtggataaaaaatgaccttcattggaaaacgattaaacgaaacgaagataccattaaactggcagaaggaattaatgtcttgaactttggaagcggacatgcttggggtatgcttggccttcatgttcatttgcctgaaacaggtggcattatcttagcatctgatgcaatctatacagctgagagctatggtcctcctgtgaaaccacccggtattatctacgactctctcgggtatgcaaacacggttgaacgtatacgccgtctagcctacgaaactaattcgcaagtttggtttggtcacgatgcaaatcaatttcagcagttccgcaaatctactgaaggttattacgagtgaaatcaagcaactgcttaagataaaaaatttttctataaattggagggcaaacaaatgaccatctcaaaactagttttcacccctctcagctatacaggatggggatcgcttcaacaactgcttccggaagtgaaaaaatatcatcctgctcatattttaatcgtcacagatcccgtgttaaaagacattggacttgtagataaagtgagtgctcctcttatccaaaatgggtatgaagtagatgtatacgcagatacggcaccagagccgcctttagcgcttggtgaaaaactcgtatcttacgcaaaaagccaaaaatttgatttagtcattggagttggtgggggcagcgcattagatttagcaaaacttacggccgttttagccgctcacgacggcgctgtagaagaatacttgaacttaactggtacaaaacaaatttcaaaaaaaggtcttcctaaaattttaattcctacaacttccggcacgggttcagaagtaacgaatatttctgtattatctcttgaaagcacaaaagacgttgtgacccacgactatttgcttgcagacgctgccattgtagatcctgagcttacgctaagcgtgccttctaaagtaacggcggctacagggggtgatgcattaactcatgccgttgaagcttatgtatcagtaaatgcaaatccagcaaccgatgccttagcactaaaggctatacgcatgattagctcttctttaagaacagctgtagaaaacggcaaagataaagaagcgcgaactcagatgagctacggaagctatttagcgggacttgctttttttaacgcaggcgtagccggtgttcatgcacttgcctatccgttaggtggacagtttcatatttcacacggtgaatcaaacgccgtattgcttccatatgtgatgggttacatacgcagcagctgcgtggaaaagatgcgggatatttttgaagcactaggcggaaacgctacctctttatcagaagaagaagcttcttatcagtgtgtgaaacagctgcagtcacttgtcaaagacgtgggcattcctcaaactcttcgcggatttgatattccagaaagtgcccttcaaaagctgacaggagatggcgtccagcaaaaacgaattctcgctcgcagtcctttgcctcttcatgagaaagacatacgagctatttaccaatcggcttatgatggcgctatagtagaacctctacactaaagaactcccccttacctaagggggagttctatttatgctgctttagccgttgtaccaaaacgattctctttagggtcactaggctgacagaataagacaattagccaaataccgccaataagcggaactaatgtaatgagctgccaccatccgctttttcccgtatcatggagccttcttgctcctaccgctaacgaagggactgcaatcaatagcgagtagattaccggcagaaaaagaggcttatcaataacgaactgaatgaaagaaagaataaatgaaataacaaagttgaccaatacaaacatccagtattcagttcggcttgctctgccagaaaacgtcccgtaatttttcaacacttttatgtaccacttcatatgcaacaccctccttttttagtataaaattgtaaatttatagtttatatatcctttttattcaaaaaacaaaccgttaaacgaacaaataacgacattttttatacaaaagaaaaaacttctttcaaaaaaagaagttttcgtaatgtattatgcttttctatttaatcaaatcatttcggtcttccatacttggcggttcctcaagccacccgtttttggccatgatttttcccccgtcttgcccgtatgttaaaatgtctttggccgtactgacaagagtaagaggaagatctccacgtaaactaaatgcagtgcctagagcgttgcttcccagcccaaaactgcagaacaaactcacgcagtacatcattagtttatctgaaaaaggtgctacttttgactcggtcgctttcgctccccacgttgcaggcgtctgaatatcgctctctaaaagaattttgctataatcacttacaattttcttagccagctcttttccttttacaaaatacttctttacttcaggctcacttgctacttgagcaaaccctgtgatcatttgcatgccaagaatgttgctttcaatagcataataaatatgcgctacctctacagtatttaatgcacgtttactggaaaataaatggaggccattcatataatctgtaccttcagcaaacttcactgttttaggtactgaaacagctggaggccttggaagcacgttttttccctgaagataatctacacatttgtcatagccactttgcgtgaaagcggtaagctctttatatagagagatcatgtcttttctgtaggacatggttaaatgaagcgtatgtagccccatgctaatttcttttaaaaggcgaagaaacataatatcaaacactttatcataaagcttaggaacaccgacatttacgtctttttctgtgtatcctaccggtatggctgccccttcattttttagaatcgttttgatatcttcaatatagttcacaacttgcatatgcgtatcttgcataatttcttttgccccgtcatcttctgcgtgcgcaataaaatattctaaaattctttgggtcattgtcttttgctgataggtcatccaaagagtagcaatttcacttgaacttaacggtatttcttgactcatgcactcaacctcctgctagggatacatacgtaaatcttcatttattcaagagtgggtatctgtaatgaagactttattctagaccttaacattcgtccccgcagtcagatacacaactctgtctcttcctcaattaattctgcttcatttactatgcacaaattggaagaattctatgtatttaccctcgcttttaaatggaggaaacaaaaaaaagctccctctcattaaaggcgctttttcaaagaaaacgtttttattccatcgtatcagaaattcttttgtagcttccgcatttttttagatattgaataatatcttgatcttttacacgttgaatagctgatccgaacagttctgctgctacctgcatacgttcatgtttatgttcaatggtcataatatatcgaagcgcatccacaaccggtgcattgtgacgtgtacgacgagttatgtactcgtgaatggcttcatttaacccttccgattccgcttgttgaaactcaggttttcttactgcttgactatataccacttttttccactccttctcctcatttttaatcatttttatctttcttttatttccatttccctaacaaaagggaaacaaaacatgcaatgttaacttttttagagttttctagcaaatgcatgacgcatttaaaagaacataggtttgaccctttataaggaaactatgatatattttttgtctacacagactatacacagtaaggagtgaggtatttagatatgaataaagctgaatttattgatgctgttgcttcaaaatcagaattaacaaaacaagacgcaaaaaaagcgattaagcttatagcttcaataaaatcatagtttttttaaaatacgttgattaaaaaaacaccctgagaggatgtttaatagttagcttgtaaagcttcactctttttctttagtttttgactttcttcttctaactcaataattttattttggagctctgtattatcaaagtcttgctctaactcttcagataactttattcgctgtttatgaatttcaattcgttgtttagcaatcgcttctacttctttgtttaattgtaattgttcatatggattcatataaattcctcccttactttcactttcaacacaagaagacagattcctttaaaataaagtccagtgagtgttccctataaacatgctaatggccccaaacgcactagcaataaaactaaaattccatacagtgcgcatccaaactgctaaagaatcatatgtctttttaaaggctacttcacgcataaagatgagataaagaactgtaaacccatatacaccaaatgctacccattgaaaagtttcttgaatttgtggaactattagaacaactgctactaacgctacggtgaaaatgaggttcacaatcataaagaagctgacgaaacgcatccacttaaatcccttttcgtctagttccgcagcaccttggttttttcgctttaattcctccattgttcattacccctagtattcagttttatccattatagcacgttatcctagtgttattcttaaagtactagtatcgttatgttcaaatttcagagattagactcaaagattttgaagttttcacattagaattttatacaggctcaatcaaaatctgtagttatctaacataaataaaagagcagtttgcaaatgcaaactgctctttcgatgacccgtacgggattcgaacccgtgttaccgccgtgaaagggcggtgtcttaaccacttgaccaacgggccaagattgttttttaagtttaacttaacggtttgttatactggtgggcctaagtggactcgaaccaccgacctcacgcttatcaggcgtgcgctctaaccagctgagctataggcccttaatcctcatatgtatctaaaatggcaggggcagtaggaattgaacccacactgacggttttggagaccgtagttctacctttaaactatgcccctataaaaagtagcagtcatgacgggatcgaaccgccgaccccccctgcttgtaaggcaggtgctctctcagctgagctaatcctccaaaaaaatctatataagcgctataaacagcgttgttttcattacttataatagaatgttccaaataaaaaacccctatgctcttttacaagaggttaataagggtccttatcattgaattgcctggcaacgtcctactctcacagggacaaagtcccaactaccattggcgctaaagagcttaacttccgtgttcggtatgggaacgggtgtgacctcttcgctatcgccaccagacctgtatctcaataattagttggttgcggggacaggatttgaacctgcgaccttcgggttatgagcccgacgagctaccgaactgctccaccccgcgatgataaaaaagcaaaataaaaatgcctagcgatgtcctactctcacagggacaaagtcccaactaccatcggcgctaaagagcttaacttccgtgttcggtatgggaacgggtgtgacctcttcgccattatcactagacattttatatgagattgttctctcaaaactagataacagtttgctaagtaaagcttacgcttttaaaatttggttaagtcctcgatcgattagtatcagtcagctacacatgtcgccacgcttccacctctgacctatcaacctgatcatctttcagggatcttactagcttgcgctatgggaaatctcatcttgnnnnnnnnnnnnnnnnnnnnnnnnnnnnnnnnnnnnnnnnnnnnnnnnnnnnnnnnnnnnnnnnnnnnnnnnnnnnnnnnnnnnnnnnnnnnnnnnnnnntccgccgctaacgtcatagaagcaagcttctaatcagttcgctcgacttgcatgtattaggcacgccgccagcgttcatcctgagccaggatcaaactctccgaagaaatgtttgacttgctcaattaaaaaataaaatttaacgttgacgtttgtcgctttgttcagttttcaaagttcaatgttcaaatcataagttgtcgtttcaacgacgcttaataataataaaacatatcaaatgaaacgtcaatagtttttctaaaaaaacattcttttttatttccattgtattttacacatcacggtaacaactattcattaaacattaattattatattttaatatccccactccacttttttcaaatgtgaaattgatgctaataaaatatgaatgaaagaaaagatataaagtatctatgctctctttataaggcatacttataaagagaggagtagtgattagtatgtattatagtaaaagaaatcaagaacctccggttcaagaagaaacagaaatttgggaatgtacagtagaagagtgtaaaggctggatgagaaaagacttctcttacgatagtcatcagaaatgtcctttgtgtaaaagtcagatggaagctaaaaaacgccttattgataaaatcccccgtaatcctcatagaagataatgtacacctatgctttttaaaagattaaacactacctatacataaaaaagtctttgttcatatttgctttctatttctattgtatgttataactaattaaccttgtatcgatcgtcttgtctaaaacccaggctttttttaagcctgggttttctattgaactaatagtagataaatcatggttttctaattataagaccataaaaaaaagactcctttataaggagtctttttcgttatcacttttaattatgctttatgaacgttagcagcttgtgctccacgttgaccttcttcgatatcaaaagtaactttttgaccttcttctaatgatttgaaaccttcaccttgaatagcactgaaatgaacgaatacatcgtctccgccttcgatttcaatgaaaccgaaacctttgtctgcgttaaaccattttactgtaccttgtgtcataatgttgcctcctgctgtggaatactccacaaatgtattaccaatcttgcccaaacatactatttcaagataaaaacttctaattaggttttttcttttctcaatataccgaacaaaaataagttatctgtagtgtaacatatagtaggctttatagcaaataaggaaaatatccccttcaacaagttctaactattcatctttcccctaccaagacttatgataggcatatgtagcataacttatgaatgctcgagcactttgaacaaaatgaatatgtgtatatctccatttattatagctattcataataattcattatttaatctttgttataaataaagggtgcatataatccaaaaaacccctgttagctttactgaattataaataggctattgggatattctatttaaggaagaaggaaaacaagttattgattacaactaatcattacaaagcttcttacatttgggatgaggtgtctatagcaggcatatttcagaaaaccttattgtaaatcgatgtatgtttgattcataaggggatggtagtcatgagcgtagtaagaatatatataatgggtagacaataacgttcatttataactatacaaatgaggtgtttgtcccagaccaagaacgatttcgttcacattgtatattttttagttcaatgcttaaatgaggtgttccttaaagatcatatgctgcattaaaagctattttttccttcttcacatgacgggatgcataatcgtttgcatctcgtttttgttacataaaaaaaagaatgtttattctcttttcatggggtaaagaaaggcctgtatctgtttagatacaggcctttctttcgagttcagttaccacaaacttctttatttaatttttgtttcatcagaaaataatataagatcgcaggaactattattccaatcagccaggcaatatctgcgccaccaaatgcctttgctataggaccaatgtagaatgatgtgttaacaaaaggaatctctgcaacaattgatacagcaaatgccatgcaagtgattccatttatttttccgtattgaccatttacatcaaagatatctttcacattatattgaccacggggcaataagtagtagtccacaagattgagagacgtccaaggaatcaagaaatagctaatgaaaaagataaaatttaagaaaaatgatagaaaattactttggcctaataaacataggatagtacctgccaaagtaacacaaaacatcatccttactctaactttttgtgttactttgagcttccaaaagggctctatagttgtaatcgttgacataaaagcaccatataaattaaaaacattaatagctagttgaccaaaaataatgatcaaatacataaagatagcaaaacttccgaataagtgagctaaattcccaccagaattatcaaggaaattaggaatagcaattgttagagttgcttctaaaatcattcatctatacagtccctacaaatgtacccaggtaactataccaaaaggtttgtgcagttgatgtattagcaggcagatagcgtgaatagtctgctacgtatggtgcatatgctaattgccatgttgctacaatgctgatagcgagtaaaaatacaggtaaatataagccatttaatgaaaaacttcctgtcggaagtggtaacctgaaatataataattgctgctagatataccaccttgtaagatatttgttgcttgcactctaagtcaaactatataattcaacgtttttatacttacttatagtaggtgatgaatcattcttataattaacatgtgttcccttgaatcatttgatataacagctatataagacttcgctacgtttaattaagtaacaaatttattgtgctccttttataaattgctgttcataaaaaaggtgttgcaatggagggataaacttttttaataagaggaactgcaagattttagcgcctaactgcttaggtaccttcttatttaatttgataatttttttatacggtctcttagagcattagtatataataacatagatgcatcttctctcaacaatttctttaggcccgtccaatactacttgaggcattgaagtcgcttttccttccccggcctcccaatctaacttatttattctcatatcaaacttccttttatttaatcaaaaacgttcataaaagtgtgtcaacttacgaagacgttcgtaagttgttttcaaactaaaacgaacgataaacatgatagattacttatataaaagaaaagtccgtaaaggtatatttttacggacggtgtatttgattttgtttcaaaatgtccaaatttgtgaaaactagtaattcaaaccttgatattactgtaatttcaaacctttcaatatataattaagtaacaaggaggtttggaatatgaaatcaattcaagtcacacagtttggtggacctgagaaattagtatttaaggacgttaaggatgtagtagcagaaaagggagaagtatgtgttcgtttgtatgcagcaggtgtcaatccgagtgatacttacacattagcaggtacatatgcgtttagtatacctcagttgccttatactccaggattagacggtgcaggagttgtggagtcgattggagaagaagttacaaatgttcatgtcggtgatcgtgtatttattgcgtctttaatgggaagtaaaaatacaggaacctttgcccaaaaagtagtatgtgatgcaacgttggttcatccattaccatcccatgtatcttttgaacaaggtgcagcattaggggtacccgcactaacggcctatcgtgcgctatttcaacgtgcctgcctgaagcccggtcaaaccgtgcttattcatggagccagtggtggagtcggattacaggttgtacaaatggcgaaatctcacggtgcaaaagtgattggaacagcaagcaagccagagggtaaaaaaatggttcagcaagctggtgcagattttgtcactgatcatgtgacagaagcaacgattgaagatgtgttagccttaatggatggcaatgggcctgatgtaattattgagtttttagcaaataagaatttagaaacagatttaaagctgattgcaccattcggtaagattataattgttggaaaccgtggttcaatagacataaacccacgccttgccatgcaaaaagaatgtgatattttagcaacagctctttggaatgcaccaaaggatgaatatgaacaaagtattcatggggtaattggcatgctaacaagtggtgcacttcgtcccattattggtacaactttgccactccagcaagtatcgcagggctttaaacaactagaaaaaggtataggaaatggtaaacttgttttgataattgactaattaatctacataattaaggtattcacttaaattaaatactgcattagtcaactaagcaaatactagaaggaccttacagggtccttttttctattaaaaagtgaaaatatagagggataggttaacgaagtaagctaaatgggtatgtactattaagatgaaaggagtttttacagtgttagctttaattcttaaacttactatctcattttttgctgttatgaatccactcggaaacatacctattttcattactcttacgaatgattattctattcaagaaagacgtcatagtgcaaggaaggctgtcattatctcttttattattcttaccctatttttacttttagggagttttatcttttccgcctttgggatcaccatacatgcttttcgtgtagcaggaggaatcttaatctttggaattgcctatagcttgcttcatgctaaaccttctaatgcacaaagtcctcattcgcatgaacaaaaagctgcagcttcccaaaatgatatttccattaccccccttgctctgccgattatggctggacccggaacaattgcgacagtcatgtctcacagttcttattcgatagcaaatctagggagtgtactcattagttacacccttatattaggagttacttttatccttttctattattctacagctattatcaaaaagctcggacagaatggtttaaatgttatctcaaggttaatgggattaatactagcagtgatggctatacaaatgattgcagaaggtgttcacgggttatttcctcatctgtaatcattcaaaaagactattcctataggaacgagcatatgtataaaaagtacgctttttatacattctcgtttctttcaactctccacagaacgtagtcatatcaaggatgtataaaaagctgtatactctgtaaaaagtggctgttttgaaacccttgtctcccaagggttctttttggtggtgtgttccggaagagtgattatgttaactaaggttgtatatgatatacagcttaaaaacagaaaaaacctatctcttcccaatccgaagaggtaggttttttctgttacgtaattgggtttcatgagtgatgcctcattgcatcttgagtagtttgctgaatatattcgtttgtattcattttttattatttttctcttgcaatttcttttctattaggagcaagtggtggttgttctaaccatttattttttaccataatgttaaaccatttttttgttaccattagatttttgagaatggtgccttcataagctgttacaagatctgttcgcatggctgatgctaaacctgctccgtgataattttgtgcagcttggaacaagaaaccaatatgatacatcattaatttatcagaaaaaggggcgtctgttgaatttgttacttctgtctcccacgatttgggaactggtaaattatctgcgtgcattatttttgacaaggattgtatttgattatcagctgttttctccgaatcctctaaaaattttcttacttcttttgattgagagacctgactaaatccaatagaaagagttttagccataatgctttttttaaggttgaaagaaatacttatgatttctgttgccgtcaagcgtctgccttttccaaaaaatccatctgaaaaatcctgactagaaatatattcagggttcttagcaggataaaaataaggatccctctgaaactcccctttttcaagtaataattcgattgtttgatgatacatcctttttgcatcattatcacatgaatcgtagaagtagcgtaagtcttctctgacagaaacacctaatgaggttgtatgtcctagcaaaccgtgtaacgtcatgatatgtaaataattcaagcaaaatgtatcagtgaataatttttgggtacctttattgaggtcagactcagtaaatccaattggaactggaaacccctcgttttctataaaagttacgatttgtttcttttgttttgcgaaggtcttgattgcatcttcaaaaacggcctttaccgactcatcctcaataatagagagcatataccgatttactacatctgtcattgttccattaacatactctccccatagtgtccctatttcagaagatgtgagttttaacttattcttatccatattatcacctcctggataatatttactaatttattaatagatatgaatttttttaaaaaagaaaaggttgttagcatgtaatttccgataattcacattatgtgaactaaacatgtatgggatatatataattaattgttagtgaataaacatagacaagcatacaagcaaggtcactagaccttaatatagatatagtatattgcacacaaaggaggtaaatcttttgtcttcatatcgaaatagaaactgtgattatgattgcgattgttcccgttgttgtcctcaaacaacaagaacgacgattactttggctgctaatccacctacagtatgtattgaaaacaataatacgacatttctttcaggacaagtactggtaaatggacagcctgctaatagggaaatagtcgaattttcagtgaatcctaatcttggtatagtgattcctctcgctgttattacgacttcttcaggtaactttacagccgtattcatagctactaatggacctgggatagtaactcttactgctacagttcctgattgtgatagagcaactactagtattcagattcctattaataactgtcagcagccttctaatgctacgattattttaaatgctaatccaaatggaatatgtagtaatggttctgtaccatcaacttccactatttcaggacaagtattggtaaatggtcaacctgctggaggagtaacagttaatttttctttaaataatccatctattggtaccttatctacttttacaattacaactgatccttccggcaatttttttgacgtaacattcactccgactaaaggatcatctaatatctcgaacattagtaatgatttttgctttatatttagtttccaaattaggatatgctctattaaataaaaaaggttaactctaatgagttaaccttttttatgctacctagaaaatgttttatggtaactacaaacgtatacttttcggacaagatatttaaatctattatagagtgttaaaggaattattatcgttaacaaaataaaaagccacccagtatttgcaggacaggtggctttttaccattaaaatgcatgtgcagaaacataataacatgttttctccatatatactatatttttccgtgcgattatatatataaaacgtgtactttttacacatcaaatccttatccacttatctaaggaacccccgttatatctatggtgtataaaagctgaataaaagagaaacaaggacctcatcataaccataatcagtaggtttttttcttacgtaactagaaattagtttttaatctttcttatggacttcaactaagaataatcttttatcaaaggcaccttttttatcctttttagattgtctaactgtctctaactctttaatggaaaacccatgacactgtgctagtccataaattacttctaataaatccgcaagttcttctataacttctttggaattagaagctgctaaatactcctttaactcttcctctcctttttttgaagttcttttaaataatcatgctctgttaaaacttctactaaacattcctctccagattcttggataatttcagggatacgatctctgactagcttattgtaaattatcatctacttcatctcctttataattaaactctatttagtgtatggtcacagccaaatccaaaagtaattactaaatttagcctctaaattttatcaaatttgcatcatagatgacctgtaacatttctatataaaaactctctaaacaaaaaaaacaagcctttgaaaacaaatgcttgttttttatttagagcttagtaatatgcatggctagaggatgcctttaatctgtacctaaactgattattgttttacactttcatattcaacaacgcgtttcattgcttggatatggcctaaatgattggattcatgtagaacggccaggcctgctagctccccaaaaatttcaaatcccataaatggtttttgaagagtttcctttaattgttcacttggaatttgctgaagacgaatggactgatccttaagctggctaatcaattcttctaagcttggcaccttacctttccagtcagccggtttcgtaccatttccaaataattcgacatagtttatcggaaggtaaatggtcttttccggaaatccaaacattaattgctcagtgaatgttaatacgtggccaatatgccaatgaattgtattgttaaagccatctggctgaacactcgctacttctgtggaaatagcttctacgtttctaataaaaaaatcttttgcaactttaaattgcttaaatactaattcatccatgtagtcccactacctttcaaccactatttttagacttttttattcttatatagctatatagacatttgatatttaggggagaaagaacgcaatctcatcacggattgttttaaatgtctaactaactgatttatttcatcctctgtagttaacgcacctatacttatacgaattgagcttctgatctcttcatctgtttttccaattgcttttaatacatgtgaaagtttagatgaagtagagctgcatgcagaagcaatagatacacaaaatcctaattcatttaacatactggctaaggattctcctctaataccagaaatttgaatgtttatcgtggaaggaacactcgcatgtatatctccgtttattaaacactcctcaatttctgtatggagattagttaagaataagttacgtaggtactctatctttgtaagattgaagtatagatcttcttgaactatttttgcagcaatcccaaaaccgacaatacctgctacattttctgttccagagcgcataccaaattcttgagaccctccaaggataagaggaggaatattcacaccttcacgtaaatataaacagcctactcccttaggtccataaatcttatgcgctgacatcgataaactgtcaattggaagttcctttaaattaacaggtattttcccaactgcctgtactgcgtcgcaatggaaatgaatattgtgctttttacacagattacctatttcttttataggctgtatagatccaatttcattatttaccatcatgactgtaacaagaactgtttggctagttatagctctttcgatatcattaacatccacaataccagccggattgacaggtattgtggtaatttgaaatccatgatgctttcttaagtaatcacacgtttttaagatagctggatgttcaattgaacttgtaataatatgcttcttctttgaactttttgctgcaatgccttttaatatagtggaattcgcctcagatccaccacttgtaaaaaatacattaccatcctcaacactgataagattagctatatctttacgtgccatttcaatggcctctttagtacgatatcctatagaataagtgctcgacggattcccaaaatgattttgaagatatggtaacataccttctaatactcttggatcaataggagtagtggcattatagtcaaaataaataggtgtatgcattgttaaaatgcaccttccccttctatcagaaactctttctgttcaaatttcttttttgttggatttgcacactgatttagaatatttaaagcaatatccacacagtgaagctgtgaaggttctaactcacctaaccattcaacaacgttatttcgtgtaatagacgaaatttcagctttagacataccaactattttttctgaaacaatacttgctgtagcaatagacgtagaacatccataagctctataagccacatcggagataacctcttggtttaaccttaaatacatgtgtactgtatcaccacaaataggattactgatttcaatcacatagtccgcatctgtaagttcaccaatattcctaggattcataaaatgatcacagattatatcattgaacattttaaattcctcctttgatagccatgcctttttctttttcttcgataaacttttcaaggttaattgcacaacaacctacttccacgcctggcatccttgaaatatatactaacgtctgtccattacggccacattcacaagatgtatcctttcttaaatatccaacatcttctgtcagaatgaagcctggataagaaatagaagttgggtcataaatagcaataacgcctctttctccatattcaacttcttctaagacattgtgtggattacgcatagaaacgtgtacccatggtggaatatgtttttcttgtttatggcattctactgcaagcatattagcttctactaatccatacatatcccttacattgtatgattgaacacctaagtattcatgacaaagctcattaaattctcctcgtggaatttcttcaccagtgaaccttttccatcctccaagcgtaataataaagctattcttttctaaattaagtttaatattgcgatccatacaatatttaattaatctatatactaaaaatggagggcctactatatgtctagtgtgctttccatcccaactctgtaagacttctacagctttttcggggttgaatgttattttctttactaaattaacgctaccatctaataaaccagcaaaaacgttcagtgcttttaccattcccatttcaggcatttcttcagttggtgggaaaagaaataatcccatccctctggagaacttaaagaactccctataggtggttacaacactatcaaatgcactatccatcgttaatcgatcacgacgagatacactaggaataccacttgttcctgtacttctcatttcgaattcaacttcatttaatttcgatgtcataagaagatgagaatcgcattgtttaaatgtttgaactggaattaaagggatttttgctaaatcattaaaactctttatatcctgagggctaatgtttttctttttacataaatcacgataaaattcgttattttcataatgatagttaaagttatctgcaataacgctgcctttatattcatttactgtatcaaaaggcattttataaaggttatgggcactgccgactaatgtatttaatggggataatcctagttcttttaacttagtagataagttcatttaacagcctccttagtgttctgagcttgtatttgttttactaacaacacaacgtcctcaatcgttttacaccagccatagtcctcagttggaatgctaatatctaacttttgctctaaatctaagacaagttctaaacggtcagttgaatccagtgataaatctccggacaaattgctatctattttaatatccgtttcttttaaaggtgaaaaaactaaaatagactctcttatcatcataaaaatcttatcgttttccataattaggacccccactaaaacttttcatatgaattaagttatatgatttgctaagaacttggcgtcttctccaacccctaataataaggcggaacctcgtcggtattgccatgataaccctagaaagtaaagacccttttcttttgttatgcctcgatcatgaattacattattgtttttatcaattatgttagggatttcaatccattcgtaatcattgtggtaaccagtggcccagatgatattctctggttggaccttctccccattttgacaaattaaactcttaccatctgcctttgaaacttttgaaacctttttaacaacgcctctacttagcagtggttttaactctttccctataattggatcattttttttcataaactgccccaattttgaatggatagttgcttttgatactccaagcacttggaaccaccaaaaaacactcctattcagtaatgtatagggtaggaatttcatccgtttacctacagatagataaacttctctgctttcagctaactccgttgcaatctgtacccctgaattaccagcacccactattaaagtcgttccttcatttaattgagtcgggtttttataatgagctgcatgaatttgaaaaatgtcttttaagacatctttctcaacatctggtacaaagggcttttgaaagggaccagtcgcaactactatatttttcgctacgtaattacccttattagtaacgaggtggaactgctcattctctttaaataaattaataacggctgtatttagttgaactggaagattataatgacgactataattctctaaataatcggcaatctcatctttgttagggtaaccatgtggcgacccttctacattcatacccggtagtgcactatgagatctaggtgtaaacaagattaaagaatcgtaacgatgacgccaagagtccccgactctactattagaatctataattaaaaacgaaagggatttttgttttaaataatagccaatagctagtcctgcttgtccagcgccaattacaattgtgttatatgaatttcccatttaacatccctccttcaacaatagtaagtacattatgcttaataggatgaattcattaggaaaagagggaaaagaacgaatttaattatgccaaacctctaagccattatttaaatacgcttttttacaagcatgtctttggattttcccactagatgtttttggtatactgctagtctttaaaaggtaaatagcatatggctgaacttcatgttcctccattacttgctgacggatgtttcttaaaacattgtctaaataacctttcaactctttttccttatgcgatctaggcctatatttacgttcgatttcagcaactataatcaacttctcttcctcattaatatcaacagaaaaggcagcgctggctcctgaaataatagcttgatctgctttttccacagttaattcaatatcttgcgggtaatggtttttccctctcattacaatgacatccttcagtctacctgttacaaaaagctggccttcatgaaagaaccctaaatccccagttcttaaaaagccattttcgtttgtgtctttcactgtattattaaacgcataatttgtttcttgttcccgtccaaaatacccttttgctatactgtttcctttaatccaaatttcacctatttcatttgatgcacatgtggttaagaaatcggtattaacaatttctactttctgatcaagccaagtcataccgcaaccaactaatttaactgaatcttcagaatttaacggtcgctctatagctttattttctaggagactttccttgcaaaagcctttggagacaagctttgttaatttttcattacctgttataaataaagttgcttcagccataccgtagcacggaaaaaattgatttagtttaaaaccacaatctttaaaagcctgggcgaacttttgaatagtttcataacgcacgggttcagccccattaaaagcaacttcccacgtacttaaatcaagctgcctcttttgttcatctgtaatcttttttaggcataagtcataagcaaaattgggtccaccgctaatagttgctttgtactttgagatagcacttagccatcgaaaaggcttttgtaaaaaatccattggcgacataaatacacatttggccccaaggtatagtggttgtagaatgttacctattaaccccatatcatgatacattggtagccacccgagcatgactgtatcctcgttatgctgacaagctgttttaatcatggcttcattatgcaaaatattaccgtgagtgaccattactcctttaggagaagatgtagatcctgaagtatattgtaaaaaggctaaagattctttatctatctttggttgtgaccaatcatcttgataatcatgagatatatcgtcaatcggaatccactttaaattcatgcttgaaagttcatctgagaaatgaaaacttatttttgaatgcaggtacgtagttgttaaaataatattagtagctgcatcgtccataatcgcttttaaacgtaacatattcctgctcaacccaggaggatacacgggaacgggtattacattcgcatagatacaacctagaaaagctttaatgtagtctattccagatggatacattaaaagagctcgttgtccttctaaacctaaatgttgtaggtaaccagcgatttgcttagcacacgtgtgaagttcttgataggtaatattaatttcatccttgttgtcattatataaaaatgtgtagaccaccttttcaggatgaaccctcgccttatgagataacaagtcaatcattgaagaataactactatttggaatagtagggttgtctatcaatttttccacgccgcctacacctcattttatatgttctaaaattaacaaactaaaaaattcactctctttcgaaggcattgatggcatttacactatgactaattgcagccccagctttaagcgcagctgctacagtcactgcttctaaaatttcatccatagttccacctagttttttatacttagctacatgagcttcaatgcaatatggacatcctgttgtatgcgctacagcaatagcgatcaactcttttattttaggaggaatcgtacctgtattaaagacttcgtgttcaaactgcataaattttgctgcaacttttggtgatctttcctttaattcccctaatctatttaaatatgattttttatataaagtatcgtctgacatcttttatttctcccatcattgtttaaatataagtaactatcataaagaattaaacaaactactttaaaataataaaaactcatttaattatcgggcgatttttccacctcttctccataatggtaatattttactacatcaaaacagaagaaaattaacctataattacctctatttgtaaaaatggtagctacaaatggattctacaaacaatattttgggttgtcaatcactttattccaaatttaagaataatttaataactattttacaagacttttaggaggtgaaataaagtctacttatccactcggataagtacagtattatacttaaaattatattgataaaatcaaagcaaaattcatttcagtcagtatttttgtatttttaggaagttttataaaaataaaaggactataagatataagaaagttcagatgtttttttagagcagatgaatctttatttagaagtgagatattcactacgtataatatgtttctataacactcaaacatttttttgaatgttaaaacatatgacaacgttaccatttttgctaaataagaatggtacaaaaaatttttaaaaaaagaatgaaatttacatttgggaataaaggtaaaaaatgataaggatagattgaggaattatatctatctacattcaagatctcttctggaacttattctagatataatcccattttttataaaaaactaggtgatgctgatgttttcaaaattgcttattgaagtgagtttggaactctttacaagcttaattttatcttatgcttcaatttcaaaacctgaagactgtaatggaccaatcgttactaagtgaactaactgcactgccatatgtttaggagaatagactaaatcattattaacccaccattctactgtcccaatcaatgctgaagaaatgaaatgtatcaataattcaggaggagttgaaaacttttgttcttgtaaatttattgtggcgaattcttttctaaatttctcttgaataacctcttgcattctgcgattaaatccatgtacccctttttcacttaacatgatttgataaaacgtagcatgatggaaaatatttgtaaatatagcttcaatcattgattgaaattgcgatatgttcactcttttcttttggatgtatatacaagggttaataatatctgttagttcctcaaaaacttcgtcaattaatttatccaccaaatcctgcttatctacatagtgaagataaaaagtagctctgttaattaatgcattgtctgcaatatccctaatggtaatagattcatagcctttctcttggattaaatcaataaacgattctttaatcatttttcttgttcgaataacacgcaaatctgtttttttaaacattttctcatcacctgtctatgatttcagttttaattaacactcagcactcatttgttgtatatataacaaatagcacaatattgattattgagtatgtgaagataaggaatataattacattgtatataacaaggcgttccttatgcaacgccctgtcaatgaaaacaagatgttcaggagggagattacgtgtgcgtatttaagagttttttttcacaaaaaagattttgggggagcttactaggaattgtcattgtcgttatgatttttagtattgctttcatagggtcaattgttaatcccactccggaggacttgccagttgcattagtagtaaatgataaaggtgctgaactgcctaataagacaaaactgaatgctggtgaacaatataaggaaacgttactagataataaagatattccttttaagtggtcagtgattgacgcaagagaagatgctatcagtgcaatgaatgaaaagaaatactatgcaacgattgtgattccagagaatatgtctcaacaaattttgtcacttcaatctccttcaccacaaaagccagaagtagaggtaattattaatcaaggaatgcattacacggctgctaatacaacaaagcaggttatcgatcaattgctttctaaaataactgggcaaattcaggataatgtttttacccagttagagactaataaagctactattactccttcgcaagctaaacttttgagcagtcctttacttgtgaagaatgaaacagttaacgaagtcggagatcatacagctaatggaaatgcccctgtattatttacacaaataatatggatcgcagtcattattagttctgttattcattttattattatgaagaaggttacaaatgggcgtataagtatccgatctattttagctcaattagttgcaggattcctatttgcaaccgccattgcttctacagtccttttatttaccgataatgtattaaacgttaatatatctgacttccaggcaacattcttatttttactatttactgcatttatgttttatttacttcaaaacgctattttaaattggttaggattggtaggggttccattattcatcttactttttctcttctcaattccggtattaaatttacctccagagtttctacctacagtaactcaagattggttttattcatgggttccttttaaatacagtgtagaaggtctacgtaatatcttctactttggagggcatgatattgaaagctatttatttgttctaggaatgataggtgtggcttcatttataatcatgtcgctctctatactcaaaacaacaagtaaagaaaaaacaatggtagctgtagaaaagtaatttttatgtattaataaaaaagaccttgagaagagcaagatatataacttactcttctcaaggtcctatttgttttaattaaccttttgatatctttaattacatgtcagctaaaagcctatacttgaccttaaacttcaggagttggcgttggttttgcataaccacttttatatttttcatcaattgattgacgaatttgtttaattgatttaccagattccaaatcagaaacggattgagctgctatttcgagacaaacaccacattttgttccatggtcatcccatattacctttccatctcttatattctcatggataaaacaatcatagttatttctatgccccgccgattcaccacagccacagtagcatggaatattctctagtagctctttgttttgggcagcattcgcgtaaatggtttgcatctcttctgatttatccttcaaaaattcaggtaaaacctcattactagctgtttcttcctttatgtcacgactaatgttttctgaatgttgttgatgctctttctttgtagcatttgttttttctttactagctgtttcttcgcttgaatttgaacaggctgtagaaactatgcttactattaacatgattaatacgactaaagactttttatgcaactaggacacccttcctactattatattagtaactaattctctaatagtaatgaaaagtttaacctacaaggtatatccatcattcttgtcgtttttaaaacaactaataataaaatccctttaatgaccatgaaatagtgaaagtgaataccgataaacgtaaataattaatactcctaaacctataagcatccatacatgtagaagtctaaaataagttacagcctggcctattacttcatgaaagataaccaaggacaatgtaccgattgctcccctagtagataaagcttgtaatttaagtgaggaggcttgtacgctttctccaattaataaactcccacctaaggataaagataagaaggctacaattagtaaaaaggataattgagttacttttgctacagaaagaatagtcacgattgccatgcactttggaatctggtgtaaaatggtggctacgaacacagaaattaattggtatatagcggttataccaaatgtaatatcagtaatgacattatgaaagaatggtcactcaatcggtttttctatatcaattaattgttgtaataaaatcttttctccttctgagcttagcacgatattacctatatacactttatttttatcacttaccttaccagtgatagcacagggtttactttcgccacatttttcgataattattgcttcattttctatagacatctccacataactctcactgccttttatccctaaggttcgtcgtagttcactagggaatgtgatacgtccaaatttacccagacctttaatcagccctatttttttcattttctcactcctaatttaaatcatctttttcttgtttattttcttttaataaaagtaatatatgaatttaaactaataacaaagatttattaagcctcattttatgatacaaactacagaattaaacaaaaatctacataaaatcagccaataatatccattaaattatttatatgtaaaaaagtatttaaatccatatatgacaacattaaatgtttctatatttaaataatggagaatacgcacttcttccttatnnnnnnnnnnnnnnnnnnnnnnnnnnnnnnnnnnnnnnnnnnnnnnnnnnnnnnnnnnnnnnnnnnnnnnnnnnnnnnnnnnnnnnnnnnnnnnnnnnnngattatatagttcctattataaattaaagatacgatttcgttgaggaaaaatgaaagcgtttaataaaattctactttaatggagtgaagatatttataaactaactacagaaaaaaattgctctcattgtatccttattaatgacctaaaggagtatcactatctcttaaagttacgctgatatatcaactccttttgaagctaagcagactacgatatctactataatccttcccttactaagaaagggactatggagggtgtaatagtctttctataattactacaacttatatgagagaggttaaaaaaatgaatcatttacagcgtaggatgggaactttttctttaacaatggttggactaggttccatcattggttcaggttggttattcggagcatggagagcagcccaaattgctggacctgctgctattatttcctggattatcggtatgattgttattttatttattggactttcttacagcgagctgggatctatgtttccggaagcaggaggtatggttaaatatacacaatattctcatggatcgtttcttggatttattgctgcttgggcaaactggattgctattgtatctgttatcccagttgaagctgttgcctctgtacaatatatgagttcttggccctgggactgggcaaagtggacaaatagtttagtgaaaaacggcacgcttactttacctggattaggcattgcttccgttttattacttatttatttcttattaaattattggacagtaagtcttttttccaaagcaaattcactcatcacaatctttaagatcgtgattcctggcttaacaattggatcacttttatttgccggttttcatagtggaaattttacgtctgaagaaggcatcgcgccaaatggttgggcaagcgtactgacggcggtagcaacgtccggtattgtatttgcatttaatggttttcaaagccctattaatatggctggagaagcaaagaatcctgggcgttctattccattagctgtagtaggatcgattctaattgctaccgttatttatatcttattacaggttgcgtttattggagcagttgacccttctatggttgttcatggatggagtcaccttaatttcaactctccatttgctgatttggctattgctctaagtattaactggcttgttattatattgtacgctgatgcatttgtttctccttctggaacgggaataacctatactgctaccacatctcgtatgatatacggtatggaaaagaataaatatttacctggtgttttagggaaattgcaccctatttatggtgtgccacgtcaagcaatgtttttcaatttagccgtatcattcattttcttatttctatttagaggttggggtgtattagctgaaattatttcagttgcgacattaatctcttatattaccggacctgttacagccatgacgttaagaagaacgggaaaagagttgtacagaccattacgtctaaagggattaagtattattgcgccactgggttttatatttgcgtcattaactctgtactgggcgaggtggccacttacaggacaggtgttattcattattatgatgggtcttcctatttacttttattatcaagcaaagttgaaatggaaggggttccagaagaacttcttagctggactttggatggttacttacttattatgtatgatggttatttcatatttaggaagtgaaaaatttggtggaataaatgttattccatacggttgggacatgcttatcattacatgtttgtctcttgttttttatgtttgggctgtaaagagtggatttaaaacagaatacctcaaggaagccaccaaagtaaatgaagaaatgaaattaagggagagaacaataaaatctcaattagataaagaaaaagctgtataaaaattggtttctaatacaagtattttataagtatgtggagatagttgttatgttgaaaaataaggtaggaaagttaaaaatctttacggtagactattctatattaaaaaataataaaataattaataattccatagtcatgcaatccattaatgatccagatgaaattgtaaggttagctaaattggatatatctacaaaagaaagagtgttcattcaaaatgtaaagattttaagatttaagtccgtcccatctcatggacataatttagaatagaagaaactcttctaaaagggaatttacttacaatagcaaaagcttcttttgacgatgttattgagatattttacttgtcttattagatgcctagggcatctttttctcttttctcatatgttcgagggctataggaaaagtcgaattcctaactatcgtaatgccacgagaagtcaaaacataaaaaggccgaaaagttttctaaaaaacactgtacattcttttcgtctcttgtttcatttatataacaatagtgaaagctgttattttatggaggttttatatgtcggataaagtgccattttcatttatattagttattggtttaatgttatttgctctattcttcggggcaggaaatttaattttcccgccaatgcttggtcaatcagcaggaataaatatttggtcagctaatgccggatttttagtaaccggagttgggttaccgttacttggtgtgttagcatttggtttttcggggaaagatgatgtacagtcactagcgagtcgcgtacaccctgtgtttgctcttgtatttacaaccgtactttatttagcgattggtcctttattttccataccaagagcaggaaccgtttcttttgagataggcatcaaacctttcttggcggaagatctagaccacatacctttatttattttcaccatcatcttttttagcatcacatgctttttctcactaaatcctgttaaaactatcaatattatcggaaaattcctaacccctattaagttaacatttattgggattcttgtagcgatggcttttattcatcctattggggatttccaggcgcctacgaagaactataaaatccactcatttttcaagggatttcaggaaggttatttaacaatggatgctcttgcagcttttgtttttggaattattattattaatgctattaaagaaaaaggcgcaaaaacaaaaaaacacattatgactatttgtgcaaaagccacaggaattgctgctattatcctaataaccatttatacggctctttcttacatgggtgcttcaagtgtagaaaaacttggacacttagataacggaggtactgttttggtaaaagtctcgaattattattttggagcttacggtggaatattattaggattaatgattacggtagcttgtttaacaactagtgtaggacttgttgcttcttgttcttcattctttcataaactatttccaaaggtaccttataaaatacttgctattagtctatgtggttttagtgcaatcgttgctaacatcgggttaacgcagttaattgctatttctatacctctattaacagctatttatccattagctattgtattgatattcttaactttttttcatcctttatttaaaggaaaaactgaagtttatcaagggagcttacttttgacatttattattagtctatttgatggattaaatacgggcggtattcacatttcatctattaatagtttctttattagagttcttcctatgtacaaagtaggactagggtggattggtccagctattattgggggattaataggttttagcatagtacaagtaaaaatccttcttaattacagttcatctagactgaataaataataaatattctaatgcaaaggttacatccatttgaaaataggagaaaatcatcaaaagggagctttgttcttattgagcacagctccctttttgacgagtttcttctgtcttgaatggggttcattttgtcttagagcaaatctcagcatctagtttattagataactttttaaatcatcaaatgagtgcttatgtttgaacattttataaagactgtgatatgttctacatatacatactatatatgcaataagaaatgaggtatttacatatgaaaaaagctgaattaatcgatgcagttgcaacaaaatcagaactaacgaaacaagatactaaaaaagctgtagatgcattgtttgaaacgatttctaatacacttgctaatgaagaaaaaattcaattgattggattcggcacatttgaagtacgtgaacgtgcagctcgtaccggacgtaatccccaaactggtgaagaaatgacgattccagcttccaaagttcctgcgtttaaacccggaaaagaattaaaagaagctcttaaataagtatagggtgaatacttttcagaaagcctcaaggttattccttggagctttctttcatttttgacatcaaaataagcaaagttaaacttgaaagcttacttcgttgatcctgacgctccataatctttaatcattaatttcacatcatagttaattggaacttcactaaatgtttgatcccaattggctttaaccctcatccatactctgggcctcttaattctcaattgatttccgaacccggccacatcgactttatattctttttgcattttttctaccgtgttttttacaagatgctccacttttttttctgagtttttttgcaccttctgtaaaaattgattttttaaaggatttcctgagaccacccaattttcagatagcctcccctcggcttcaatatgcacattgaaggaaatgctatttcctttaacatgaggttcaatatggcttttcatagattctatttcgtatacaatcagctgaccagtcttttcattaaagcttttcactagaccgcctttcccttttcctgtgatccaagtcagaccatctagttcttcttcattcaaaaaaccaatcattttgtttgttttccctttaattatggcagcacccgcaaatttgatttctccatttgctgatactatattttgcaacagaaaactagaccgtgattggatcttgctctccagtttaataagcggcataggaggtaaaattctcgttgttcgataggggttttctaccattgcagacaaacgaaatgctgggatctctcctgctgtttttgattcgagtgtgtcgcttgctcttcctttactaataaacatcagacaacttggtctaaaatcattgtcccgaagactttgatccactaattgttccaaactatacgatcgtgcaagggcctcaccgataaccatcactttcatatggggactagttaaggagtatcacttcttaaagataattcacgaagcatttgaaaagcagaatctcctgtttcagacacattcacataagatttctgttgaggacctccttgtttagtggttgaacttgccacttgtggggtgataagttgataggttgacgtaatcaggttctttctcgcatatccccctccttgttcctcaaattctttttcaatcatggactccttccccttatcgagcgccacacctacccctaaacttctttcttcaatttcatgactactccagcagcccgtcagaggaacgagcaaaaaaacagagagaaaaaccaataagaactgtacgtgattaaaggtttgtttcatactttctcccctttacttttgaaataatgagaagcagcagcggcaaaaagccaaataaaactaaggcagcgttgccaaccatatcccctactttaaatacatcattgatgtttttggggatcatggaaataagataaataacgggaagcacgccatacataaatggatgaatgttcttttggaaaagttgagatagtcctaatgaagcagcgtaatggttaacagtaaaagaagtaaacatttgcataatccataccaccagcaacagagaatcaaagcgttcaaatattaacccagttaattcataacttcttattaaatcaagcgtaggccacgttctcgtaaccactccatctactgagaacgctccgataaccatcacgacggtaataacataaagaagtaaaggaatcgcagtaccaatcagtacagcttttactgctttgtttggttctttcatgaatgccaatattaaaagcatgatttcaggacccgtgaatgcaagagcagttgtttttatgccttttagcaccggtgtgatacctgaacctagtaccgggcgcagattgtctacttcaaatattttgatactcataaaggcaacaagtaaaaaaagaataaccgtaataggtaatataatctcaaatagacgagcgattggatttatcccccctctgattaggtagagacttgcccacataaagggcataataatagcccatttaggggttccttccaacaatagatatcctgttacttctgccaatgaacgggcatgaaacccaccaagtactaaaaaataacctattatgaagaaactaaataacttgcccatccatttccctacaatttcttggctgtattgataaaaggttttttcagggaagcgttgacttaatttcaccataattactcctgctatcatggcaattattccgcctaaaataacacttaaccaaacatctggtgtttttacttgttccgcaactgtccggggcaaggtaagaattcctgttccaagtataaaattgataacaactacagttgcttgaggtgtcgtaatacgatcgtttgaattgatcattacccacagttcacttcctttcatcataagctacccttttcgtaaggctgtttcaattaggattctgctgaaaaatcagccatcaatgatgacaaaatatgtttatcaataagatctttatctgatggcccttcaacgaagacaatacatgctcgaatgccggtacgtcctataataaactccctaaaatgaacttcagagttatgaccaatttcttttctaacttcctttacatttgaattgaaatcacgtgtaaatggattagctgaatttttagatacagattcctgtttgttttcattttcaccactcttcctctgaagtacgagtccaattaaacaatctgcagattatatataggatgaaaaatgccattaacgcttgcataaaaacttgccactctggaagataggaaaccattgatttctccatactaatcaccctatttatctttatattaaggaggatctagacacaaacacccttaaaatatcgttatttactccatgggaaattcttttatttaccaggtagtattattcttcagtttatttcttatacaaagggaacttaatccgatttgaatataggagaaatttatgaaaagaagcctttgctcttgttgagcaaaggcttcttttgacgagtttcttctatattatattgtttttattaagatacagattttaatttctttgttaaacgtaaaaaagtttctttatctttattctttaaggaatgatcaatttcctcgaggattttacttcttttaaagtcattcatcatttgatccaaaaacaattcagccaacatttcatcacgtaaatttggattaacccgatccattccgttaagtgcattatttcccataaaacgtcaacccctttatcttttctcttttgcaaacagtattcccttttgcactttttttatgcaaggttgatagatgaagtgagatatagaataatatgcatgattaggtcctatttccttttagatatttttcatatgtctttgattagatataactgcataattaataattaatcggtcaaagtgaaatatctttcacttaacttttaagaatttgttttattcactttatttcaacataaaatttacaagcattttattattaatacgtttttaataaagtaaattcatttcaaaatacaaattcaatgtattttatataaaggagtaaaatgataaacttacttataaaaattaaagtttcactatttactctaactgacgacaaataaagtgtttttctacgatataagtaaaatgaaggcctctagaactagttcttaattctataggcttttttagttcctaagagaaaaaatgaccttgatttccgtgcctacatgttctttgctttgtatgtgaatttctcctttatgaaggctgacaatatttttagcaatggctaatcccagaccacttcctcctgaatcccgtttgcgagctttgtctactcgataaaatcgttcaaagacatgaggttgatcctcttctggtatgccgattccgtaatcttttatttgaataattcctttatgttgattgctttctaaaaagacctcaattacatcggtactatacttgatagcattatctaaaaagataatgatcacttgttttaacttcaattcatctccctcgatgaaaactgactcagaattcttatgcagaataataggccggtcataaacttgcttaaactgatcgataaggattgtacagagagaaacaagatcaactggtttcatatcaacagattcggcgtcctctaattcagctaaacttaacaatgttttagttaaacttttcattctatttgtttctaaataaattgcctcggttgcttctttggctattttttcatcttgtgttccatgccttctaagaatcgtaataaagctgctaataatagttaaaggtgttttcaattcatgggaagcatccgatataaattgtctttgcttatttgaattttcctcaagtttgccaatcatacggttaaatgtagctgccattttgtacacttcatcttttgtttcagtttccatgctaattcttttcaaggtcccactttgttcaatatcctccattgtggaaatcatggatacaataggcttcataataatagctgataaccatctaccagctagaaaagagataagaacagagatagccgtaacggtccccattatggataagataatgtctttgcggctttctagtccagataatcgttcacttatttctaacgtccctactactttttgattttgataaatcggtacatgaactaccaaattttgatgttcttgaaaaggtctaagttcaaagtctttttctgacgaaaaggtgggagagattttcttagcaagagttttatcgttactgacctgatcaataaccttagagtccggcccaacgattcgaataaaagagtgagtagacatgtaagagtttaaaagatttttgtctaatgttaaggattcggaaataggatatttcttcaacatggcattagcgtttttcgaaaccaaatgtgcttccatattaacagtcgttttcataaataagaaaaatacaatagcatttacaataagtaagctaagtaacagagaaacggtaatgaacaggttaactttggtagtgattttcatgttgatcctttcttatcacatatcctactcctcggatggtctggattaaaggggatgtagtatcttcttctagtttctttcttaaatgcccgatgaacacatccaccacattcgtttccccctcataatcatagccccagacggtcaaaagaatattgtccctgcttagtacaatatttttattttttaataaatgaacaagcaaatcatattcttttggtgttaatataatctgcttgttttgtctaattacatctctggtttctaaattcacagataaatcttctattgataagtgaacatctttttttttactaacatcctgaacgatagctctatgacgaagactattacgtaccctagctaatacttcctctatttcaaatggcttggtgatataatcattcgccccatgatctagccccatcactttatctaacgtggtgtcacgagctgtcaaaagaataatgggcaagtagatgtctttttttctaattcttcgaagaacttcaattccatttagacctggaagcataacgtctaataaaatcaaatcaatgctactatttaaggaagcttcaagaccggattttccttcgtgctcaacaagtacttggtatccttcatgctcaagttcaatttgaagtgctcgtgcaatcattacttcatcttcaacaattaaaatgctttttttcatttatattctcctcttatatctaataaaatgagatctttatattctaatttataatcagttatacgctaatacctttcattagtcgaaaaatttcaagacataagacattcaatcctagccatactccaccaaatacatacccagctgctatatcacttgggtattgtaagccgagaaataaacggctgattgcaataagtaataaagtaagaatggctgctattggtgctaatgtaggaatccataactttttagaatgtcgaaccagcataaatacagcaaatgcataaataacaaacgccattaatgactgctcacttggaaagttggatgaaagctgttttatatttgttgttttaatgcttgaattcaattgaaaataagagcaatttaaaagactaatttcttctttgcattaaatgtagcattatttatcaaaaaacctaccattttcatcaatttttaatgttatctttaatgtttttttaattacaagccctaaacttaaaacgtcctatttgaaaacgcttcatgagactattactattcgcttttctaatcaatagtttaaggagttgataaaaaatctatgtaacagaaagggaaaaacatggatatttatgaatcggttgaggagattagtatgatctaggatttttataagtttgcatttagccttgtagagtattcacctgattgagcaaatgagtgaaaaagtcagataagacagaattcaagagattttcccgtacaaggatactaaagcaggaggagtaaatatatgctcaaaaaactagtagaaggaaccatgcaaagagctatcttaatgatcgtatgtgtcgttattattttagcttggggtggtatatcagcttttcaaatgcaaagagattatctccctggcatcaataatacaacacttactgtaagcatgcgtctacctatgtatcaagctgaacaggtaaaaaaattggttacagacaagttggaaagtgccgtaagaacgacagatgggttacaagatgtggaaacgagctcatacgatggtggcttatttatgagtctctattttccgatgaatacggatatgaagcaagcagaaaccgatgtaaataaagctttatctaatgctgatattccaccaaccattacatcaacgcctcttgttacaggggttacaaccagttcttttcctatacttacgtacaacttaacgagtgataagttggatgaaaaccaattgaaatcaactgttcaacaagatatcgttcagcaattaaaaaccgttcctggagtatctgatgtctccacatttggtggagcaaaagatggatatgttttaacagtaagaatgaaggatttatcgaaaaacaatctaacgatggatgacttaaataaagcactatctttatccgttccatcattacctaaaggtattgtactccaaaatcagctatcgatccccgttacctttgagggatggaaactcgatgaacagcaaatgaaaaacattaaaattaaaaatgcggacggtaattccatccctctttcagcagtgggaagcatttcacatgcgttaaatgatgtgaaaacagttgccagaatagatggtaaaccaagtgttcaattaaatgtcattaaaacgccttctgccaatattacagacgtagcccaacatgtaaaagaacgagtacatggactgcagcttgttaaagatggctctgtttcattaacaccgcaattggatcgtgaaaaagaattaaacgattcgttaaatggtttaattcgagaaggcttacttggttgtttattctccatggtttgcgtatttttctttttccgaaatgtgcgatctacgttgcttatagctatttcgttgccgatttcattgttagcaacagctgctattttaaaaacaatgggcattacacttaacatcttaaccgtttcaggactaattgttgctatgggacgtattgtagatgattcgattgttatcctagataatatgtatcgcagaagagaaaagtctcaaaacaaagcactactgccacttttaagtgcttccgttcatgaaatggttccggctattcttggctcaacacttacaactatagctgtgtatattcccatagcttttgtaggaggaattgtaagtgcctcttatagtgggtttgcgtggtctgttgtcattgcattaattatttcattttttgttgctatgctggtcattcctacgcttgcttttatgggatggaaaggagcaccatctaagcagaaggctgtttctcttgagcctatgatgaaacctgttctagtatcggcactaaagcataagaaacttgtggtgctcatttcggctttactatttatttttgcagcctcttattcagctttccttcctgtttcattcttgccgagtgctaaaacaggtcaggttgcaattaaagtagaattgcctcaaggaagtaccttagaacaagtagatgctgaggttcaaaaggttgaaaagagtttgcaagataataaaaaagtagagtcttattcatcgacatttggtgcaaccagtacgccacaaagtgatgacgtgttcgatcaaggcggtggtttcttacagaaaccaaatgtagctaatctttcagtagtattaaagaatgagaaagaagcagatacagtgattacgcagttagcttctactcttccaaaactttcgaaaaatgtggcctatgctgtaacgagtcaaaatatttccggtgatgattcgcaaatgaagatcatgtttgccggttccgaccaggctaccttagacaaaacggctgaaaaagcacgaaaagaattatccacaatagatggattaagtgtggatggaaaaattgacttaacaaatggccaaccaaaatacaagattacgtttaaccagcaagctatcactcaaaaaggagttcagctttctgacataatgactgtgattaatagatatatgtcacaaacaaaagatgcaacgttcgtagtagaccatatgagtcttcctgttgatgtgtatgcagatcaaacatcttctaatcagcctaatattcaaatgaatacgagtccagaagatgtaatgaagtctcttggtaacgagacattctctggtaagggtggaaaaaccattaaacttaatgagctagcatcgattgcaaaagacccaacgtcttctactattagtgaacgaaacggtcaaccgttttctctagtgacagctcaaattacatccaacgatatcggcaaagtatctaaacaagttgatcagaaacttcaaggtatgaatctttcaaatggtgtaacctattcgatgggaggcataacagaacaagtcaaaagcatgatttttgatatgtcagtcgccgttgccttttctatcttattcgttttattaattacatctacactatttaaaggttggagagcacccttacctgtcttactaagtattccccttgcattaagtggcgttgttatagctcttgtgatttttggaggcgaatggaacttggctgcattgatcggcgtactgatgctcacaggaatcgttgtaaccaatggtattgtgttaattgataaaattgaacgcaaccgtaaaagtggaatggatatacaacaagccgttatttctggtagtctctctcgagttcgcccaattttaatcacggctgctacaacaatcttaacgttgttgccactcgctttctctcatcaagcagatacggtaatttctcaaacgttaggaattgtagtaattggtggaatgattacatcaacttgtaatagcttcctagtgattccaatcatttatcaatggctgcataagaagcaggcaagtaaagacgttaattcgaataaacttactcaacaaatatagcaacaagcaaaagagcatacagtaaatttgtatgctccttctcttgttttacgaataaaaaaaccttttatataaagacctagttaccataaaacgtattctaggtagcataaaaaaggttaactcattagagttaaccttttttatttaatagagcatatcctaatttggaaactaaatataaagcaaaaatcattactaatgttcgagatattagatagccatcaatagctagctcataacctttcggaactaataagtttggattaacaaataaataaattgataatgccaatgataaaaagattaaaatgtaagctacaactgacctattttccataaacattccaccttgcatttatatgtataatctaaataataacatttatggataaataaagttatttaattcacataatccatattacaggaaccaatcaaaaacatatccattgtttcttacaatggatatgttttcaaatgcttatatcttatcaattcaccattcgaattaacaacaacttcatcaaccccataagttatatgtgcacgataaaaaggctttattcttaacgttatttcatacaatccgccgacaccatacaactgctttatcttaagaatttttgctccagttgtatcccatctaagaccttgtggtgcatttatatcgttcttatagatttctacaattgctttatctactggctctcttaggctactcataagtgcataatttagagtgtcacatagtgttgtatcagcttcatttattgtttttgcattcacatttgcagttgatattatcaaaaccattattccgattgtaagcatccctgtaatcctcttcatgaatatcacctcatcttagtttcagaaaaactaaaatgatttattcagcagcttctttaactgtataccatatacaaaattagttaacataatgtctcttccggtacacatataaaaaacgagtcctttatacataaagactcgttagcttttccattttctcatttatgtattttttttatacatcattgatacaccggtctttttattaaaaggacgagccacatcgatgtgtaacaaatgtatcttttatacatttgttatctttaaaaatttaaaatttaatcctctacaagttcgaatacctctgtaaatattttcataaagtaaacctctaacaaatcacccaatttactgcccagctttagatattcattatcagcttgttctaggacattgcaaaaatcttcttctgctatttcgtcattttctaaagctttatataagttccacaacttttcaccatattcttgctcaatcagtgaataatcatgagcattaatgtcttcaagaatactcgtcaattccctaaagtaattatttacacctatctcatctatataccatgaagaccaatcaaatagtttttcatgtcccccactctcaagttcagaataataatcaaaaactatatatactttattggcaacctggttttccgttggaaatttgtattcccccatcaaatcgacaaccgcattccagatatcatcagctttcaatattttacttttgtttaatttatatttcaatgactagatcctccacaaatataataagatatcctctgtaccaattgtaacagaatatttatctaaaaatattgttgttagaaatgccacctatctaaactattgaatttaaagtccgtaaaagtacacctttgcgaaccaaactaaagctccattagcgaacagttttcggtattcgaaaaagtataaaaacactatacgaacgcctttatattgacacaccacttttacgagcgtttttcagataaaagcatcttatatatcgttcatttaaactgtttacaatttgaatcaaatcctgcatattgcgttctagtcgatccaatcgccaaacaacaattgcatctccttcacgagcatcacccagagcctcctccaaaccaggacgttgtttttttgctccactcattttatcgtgaaaaatttttgtacaaccacgttttataagtacatctgtttgtaaatctaaattttgtcatcctgttgatacacgtgcatatccaataaccccccattatcactctttcttatttttctcttattcgattgtaatataaaatagaataagaaaggttattgaacacagaatactgtacagagtttcattacaaaaaacactaagaatcgacttttcccacttagaatgtagcgtgtgcagaaacggataaaaaaacaattatttttcataaagctctaacaagcgtttgtgtatccaaatagctgcctgtaaaccttctcccatcgctaccgtcacttgttcagaatgagccacaatatctcctgctgcccacacgtttgagacatttgtttcttttgtacgcggatttacgataatgtgctgattttctagaagttctgctccgagctcatgcgctaactctgttcgaactttatttcctccgaacgctaaaaaacctttttctccatagataaattcattgttttcgaggatgactccttttaacatgtctgcttcagctatgactttttttattgtcgcttctttataggtaattcccttttgcatcaaggtatctgctaaaggtccaatttcttttttgtcgtgattaatgtacgtaatgtcatttgtccaatatgttaacgtaagagataaactggctcctgcttttcctgaccctagtactaatacccttctattatttacttcatacccatcgcagtcgggacatacatatacggttgttcccatgcacggatatagctcttgctgaagttcaggcggaatccggtctactactcccgtcgcaaacagtaaagtagttgcttcatagttcgcagagtttgtaatgacgttaaacccttctattcttttttcacactgaaggacacgctcttctgcaaattgaatgccgtagctttttgcttgcttccttcccgtttctcttagagtttgcccacttattccctcaggccatcccaatatattttgataatttttgcaaagattggaacgtccatcgtttgaatcaataaccaatacactgcgcttatatcttccaagctgaatagcggcttgaagtccagcaattcctccacctataataacgcaatcatacttatctgtcacagcacatcacctcagcttttactattttctaaacgaaagcttcagtttttcattatctgtttttccattatttttatacgctttattgtctttattttttgaagtccttctatacaaaaaaaaccgcctcggcagctgccctgcctagagacggtttttataaaatgaaaaaagatgatattactcacttttctttcctgcttctttttcattaattttagtaatcagctcttctttatacacttcactatctttcccgtagcgtagacgactatgacagttgggacataatgcagcagcgtcctttggcttagcgagtccgccctctgacagctttggaagatagtacatttgtaaaaaggagctgccatcttttgcgataaacggcgcgctttctccgcaggcttcgcaaatacctgctgcgcgtttgtgaacatattgtttaagagctgccgtttgttcgtaaacacttgtctttttttcttctcctaatgctatatgacgaagctgttcagttgaataaggtgaaacatccagctttgctgctttttcctcaatcacaggatttcgttcaagttcaaaaataatagcttcacgaagctctccgtctgagtcccacatgatttctaattgatgattaatatacgtcacttcatcaatgaactctactactccaggctccacgtagtgaaacaagtaaacggcttttcctgataaaaaatgttcacgaagcgctttattgcctttaatgagctgcatcgatcctctttggccttctcccgtatagaaaaaagcggttttatctctgttccacccgtgtcctgttccgtattcacttccgctttcttttgtgaaaataaaaatatatggatgcgcttttggcgttgatatttcgctttgttcctgccctttataaagcttatgaatttgttttctgcgataacgatgtcctttttgaaagaaatctccgcgctgtaaatccgtaatcaatgaattgcctcctactgcggtcctgcttttatagtacttatagctctactatacactaatttttgttttctttgcagatcgtttcttctatctatcagatttatatcatacaaaaaaagcagctgtgtgggcagctgcttttttgcgatagtcaattttgcaccgtatagtcttctcctagccattttgtgctgagtttttttaatgtaccgtcttttttcagctttttaatcgcctgatcgacttccgactttaacttttcgtcttttttgttaaacataaaatatacttttgaattaatcacgatatctccaaccgttttttgctgaaatttcagcgcttgattgctaaagtcgatggaaaatggtgtcgcaagcgtagcatctgcccggcctgtttttaattgagttgtggcatcatccgcaccttgaccggcgtaaactacatcgattttattgccgtgtttttgattgtatttgtctagatagacagccgcattgcttgtagctcctacaatcatttttttaccttctaaattttttaatgaatgaatatcatttcgatttttaggaactgttacataaagcggagaataattatatgtttcatcattaaataaaaactttttctttcgctcagcgttctgagccatgttatgagcaatcatatcaattttattactttctaagctgagaagcagatttgaaaattccatcgttttaaattcaaatttataatcctgtagctctttgtcgattgctcttactacttctacatcatagccggtcagtttgcctttatcatcgataaagcaaatattaggaaactgagtgcctgttccaaccacaatcgtttgaacatctttttctttcttttctcctgcacttgaagatgcgtttgttccgcatcctgccacgctcacagctactacaattgaaagtaaaaacagccaatattttttcatactttcctcccctaaatccctatattatgtaataaaaagaggctcttgatgaagcagctgcttcatcaagagcctctggttaaccagtgggcttacttcgtgtaagattattcacatcataatactagttaaccgataaatcaagtaggtttttagaaaaagattatcttgacagcccggtgtctaccgcttaagatacaactaataaaacattgaaactacatatctaccagtcaactggaggcaaatggacacgataatgcgtgtacgtttgctttttttattgtcgtctaccattttatcttttggaggtaaaacgtatgaaatttgctttatttagtcttattcaaaacatcccgaacccggttactggagaaacattcactgctcaagaaaagtttcaacatgtgttaaatcaagcagtgctggcagaaaagttaggttttgatgcttacggagtcggcgaaagacacggagctccttttttgtcttcttctcctcccgttgttttaagtgcaattgcggctaaaacgtcacacatccgtctccttacgaccgttaccgttctaagcattttagaccctgtacgagtagctgaagattatgcaacgcttgatcacctatcgggtggacgccttgaactgattatcggaaaaggcaatgacccgcgtcattatccgctttttggtattacagaagaagaacaatgggaatctcttgctgaaagatacgctcttttaaaacagctttggacagaagaaaatgtcacgtggagcggccgttatcgtccgtatttaactaacgttacgactcagcctcggccgtttcagacttctattcccgtttggcatggaagcgcgtcaagctcactgtctacagaacttgcggctaaatacggagagccgctattttcatctaattccttccaccctcaggctaaatataaagcgctgattgaccattaccgcgaacgcttcgcttattatggccatgatccacgcaaggccattgtcggttcgggggcgagcagcctatatatttccgatacaacggaagaagcgattcgccgctatcgcccgtactataacgcatttagcaatacagaagcagccaaacataatcaatcgccgttcacgtcactcgaagacatcgttcaacacggtcctgctttagtaggaagcccggagcaaatcattgaaaaaataatagactatcaccgcgcttatggaaacgaagtgctgagcatcagcgtagacggtctaagcgaagcagaacagcgcgaacagctagagcgctttgcagatgatattgcacctgttcttcgaaaagaacttcccagcagcgtgtgggaaaataaaaaaaagaaaactcctttttaacaggagttttctttagctaaaaataatttgtctattagtttattaacttttaaactaataaactactctggttaagatgcctgcgtgtctgtatcgtaaatattggctgttacttcgcttctttgacaaagtaagatgagcagccaaatacctccgataactggaacaaagttaattaaataccaccagccgcttcttcctgtatcatgcagtcggcgaacagtaacggcaagtgaaggcagaatcattgctgctgcgtatagccatattaaaataggtgcaaagactgtaagtgaatcaatgaaaataaatataaatggaacaagtgcaaagatataactaaataatgtaaacatccaatactccgtacgcgttgctcttccttgaaacgtcgcgtaattttttaacgcttttatataccagtacatgacaaaccctctctttgtttattaaatcaaactatctaatcatttaagtcctacgcaactttattaggtacatcaaaacgatttagctgcgactcacttcttagacaaagaagaatgaatagacaaatacttccggcaatcggaataatactaataagctgccaccagccgcttcttcctatgtcatgcagtcggcgtgccgtcacagcaagagatggaatgaagactgcaacaagataaactatacgcaaaaacgggggcatatctgttataagttcaatagctgaaagcacacaccatataataaaattaaataagacaaacatccaatactctttacgcgtcgctctcccttgaaacactgcataatttttcagtacatgtaaataccatttcatacaaaaacctccttttttaaaacattttttgtaagacaagcttactagcagtaattaccttagcatacaaaaaattattttcatatcctattttttaaaaaaattccaattgataatatagatataggaaagggatggataataattagtaataaatacccaataaattcagatcaaaaaccatttaatcactataattacttttaattaataaaatgtttttttataacaaaaaatctgccgtattaataaacacggcaggctctatctttacttatgttcggtaaaagtaaggcccacatgagctttcatgcgtaatcacataagtccacgtaaaatctttatcaaccacatataaatcttctaaatacatgtttgtattttcacttaaatcagcgcttgttagatgctcacatttagatagctgcagcactcgttcatcatgctcaaacaataaataacagtcgttctttatttgctgttcgaacgcttgaatcgcttgttctccttgtaaacaagggagcttttcatagctaaatgcatgccacaaaaattcatccatataaattttctttttttgcaatgcgcttaaagcacttgcaaattcattttcccatcgctttcgaaagaattcaccttgattcgataactttttaacaaacattccttttttctttaacgcatctttcattttcactgtgcttttccatcctttatcctgtattcatttctttttatcggcttcttagcttatttgtccactagtacccttgcgttaaattctttgctttttgaccaaattcactttataaaacgtaggctttaacgtgcacaaaaacaatacaattgtacttaaaagcatgatcaggcttccaccaattacagctccttgaatcgaaaagatgggcgcagccatgccgcataaaaaagtcatgataatgatcaggagtgactcaagcagtccatatatgcttcctactcgacccattatgtcaacgggaatactgttttgataaaaggtttgaaaaccagcacttgcaaaagctaacgcaaaggataagctaaaaaatcctgctccgatagtttgaaaagaagaggaacacgcatacagcaaatagccaagcgacactcctacactgccggcacctatgagaaagttggtcgacagcttcttagcaaacagtgtgttcacaactgcgccaatcataatgccagcgcctgctatggttaataaaaatccgtattcgctttcggacaaatgaatgacttttgttgcaaatgaaacttcaagagaatcaattgccgtagccatgaccattaagaaactgaataatacataaatggtgataatgtatctgttggctctactgaaacgaaacaccgctttccaatcttctcgaatggtgtttacagacagcttattttctttaacttctgtttttgtatccaggttcggcataaacaaagtaaccactcctgaggataccagcgctgcagcagtagcataaatggcaaacacaggggttccaatcataaatagcgtacctgctgcggctggcccaataagaaaactgcctgaatcaatcaaactgcgcagcgaattaaatctttttcgtttttcacgtggaataagctttgtgatataaaccatcgatgccggccgaaacattgaacttgccatactgatgataaataccagcatataaatgatcagtatggatgagaaaaacggaaagcaagcaataatccccgcgcgcatccaatctaaaaacatcataagcttccgtttgtttatgcggtcaattaagcttccagaccatatacttgtacatagtgcagcaagcggctttatcatgtatagccctgaaaccgcaagcggcgaattcgtcatatcaagcatcatgacatttaaagcaattaaataaatccagtcgccgatattgctaatgccaattccaaacagcaataaacacgggtatttccaagacaacagcttatttttcataaaagaaaggcctccgcttcactattgatttcgatcaataaaaaaatcccacccccaagacatttgtcttaggggcgagattatgaatcgcggtgccaccctagtttgttcatatgtcgccatataaaccttatcgagtacggctttcgcttatactctagctttgtaacggaagcagccgtcgcactatcacgttagatccaatgcgctgctcagaggcttgcttcaacagcgtttctcttgctccttttcagcttccggagctctctgctaagaatacgcgctgtctacttttctcttcacggcatttaatttctaacatcttaccattattatctattttttgtaaatacttattttaaaatcattttttgcggctgagaaaagaatagtcgataccctagatatacaaaataaatgatggaagctaccagcacgattccccacatattgtacatatccttatttccccatacgcctgttagtgaaaacagcgctggaatcgttaacgtcacccacgactggacaatcgctactttccccacatatgcagatacatcttttttgctcgtattaagcacataaaataaaaaccataaaaacgaccaaagaatccatgtaatagcgttaattacgtcatgataatgaacaagagaaacggtcacgtacactaaagcgataatcgatacccaaagagagtaatagccaagtcctgttccctgcattccttttaataccgtcacccctacatacaaatacgtaaggccaaataaaaaaatcgccgttctttcatacaaaatccagttgctttgatctgacgtaataattaaataaaacggaacaataacttgaaaagctccaacaaataagttaaatacgcctacgtttttttcatctgcttttccaagcagcatcagtccgtttaaaaataaagctgcacctgacagcaacagtccaatttgatccatttttcagtaagaaaagcccctagcttttcttgtcctcctctgcgtctatgtttttctttaggatgtacggagttgtggtttacatgtaaaaaagaaaaagcaattccttttaaaaaggaaactgcttttctttctgtttctattacacttataaaataaagctgacaacaattgctgacagtacgcttacaagcgtagctccgtacagtaaacgaagaccaaagcgcgctactgtatttccttgcttttcgcttaagcctttaacagctcctgacacgattccaattgatgagaagttagcaaatgatactaagaatacagatacaattccaagcgttttagcactgaatgttgaagccatatccgacaggctcatcattgccacaaattcatttgttacaagttttgttgccataattccacccgctgccacaacttctgaagcaggaacacccatgatgaatgcaaacggtgcaaacacatagccaagcagatgctggaacgatagaccaaataacatttcaaacacgttatcaatcgcagccatcagcgcaacgaaaccaattagcatcgcacctacgataatcgctactttaaatccatccataatgtattcgccaagcatttcgaagaacgtttgtttatgaccagtttgtacttctaaaatatcttcttgatccgttactgtgtaagggttaataatagaagaaataataaatccgccaaataagttaataacgatcgctgttactacatattttggttcaatcattgtcatataagcaccgacaatagacattgaaaccgtcgacatagctgatgcacaaagcgtatataaacgatttggcggcagtttgtctagttgctttttaacggtaataaatacttctgactgacctacaatagcagaagctactgcgttataagactctaattttcccattccgttaatcttgctgagaactaagccaatccatttcataatgaacggaaggattttaaagtgctgtaaaatcccaatcaagacagagataaaaacgataggaagcagcacgtttaagaaaaacggcattgatcctttattcgcaatgcctccaaatacgaactctactccttggtttgcgtatgaaagcagctttccaaaaacgctggcaatcgcattgataataatcaaaccaaactttgtattaagaagcaaagctgataaaagaacttgaatcacaaccataataacgattggtttatatttgatttctttacggttattacttgcaagatacgctaatccaaagacaacgagtaaccctaagatgccaattaaatatttcatagtatcctccactgcttacttatttttgtaagtcttttgatgaaaaatagcccggtaagatttcgttgatgttggtaatcacaaaatctccttttaggtttgctaagataatttgtgtgtgatcatcacagaactcagctaatacttgtctgcatgcgccgcaaggagaaattgggccgtccgtatctcctacaactgcaatagctgaaaactgcttgtccccttctgaaacagctttaaaaatagccgttcgctcagcgcagttcgtcaatccataggaagcgttttcaatattgcatccacgataaatcttcccatcggttgttaaaagagctgcaccaacatggaagtgagaatatggtacatgtgcttgtttgcttgctgcgattgcttcatctattaattgttttggctccaccgtcatcatcctttgcttagtttacagcaggttagttagtactaacctgctgtcatttattaataatcagagttgcttaattgaccttttgcaattgatacgccagagcttgcaccaatacgtgttgcacctgcttcaatcattgcttttgcatcttctaagcctcgaacgccgccagaagcttttacacctacatctggtccaaccgtttttctcataagcgctacgtcttctaccgttgcgcctcctgtagagaagcctgttgacgttttaacaaaatcagctccagcttttacagctagctcagaaactttcgctttttcttcgtctgttaaaagagctgtttcaataattacttttactagcgctttgccttttgcagcatctactactgcttgaatgtcgctttgcactaagtcatagtttttatcttttaacgcgccgatgttgattaccatatctacttcatctgcaccgttttcgattgcgtttgttgtttcgaatgcttttactgctgaagtagtagctccaagagggaagccgattaccgtacatactttcacttttggagcatcttttaataactcggctgctttttttacccacgttggatttacacaaaccgaagcgaatgaatattcttttgcttcttgtgctaaaaccgtgatttgctcttctgttgcatctgcttttaataatgtatgatcaataatacccgtaatgttttgactcattttgtacttcctctctgtctcttaatgaatttctttataaattaacgttggagcttccactttttcagcgaccgtgctgtaagaatcataaacgatatccattacttcctgtacatcttcactgttgctgtggattgtaacaagagagtcaccttttttcacttggtcaccaacttttttatttagcatgataccaactgctaagtcgatttcagattcttttgttgcacgtcctgcacctagcttcattgctgctacgccgattttttctgcaacgatttctgaaatatagccatcttcttttgctggcacttcaattttgtgcgctgcatccggtaatttagaaggatcgtctgcaacagaagcatctccgccttgtgcgcttaagaacgttttgaacgattctaatgcttttccatttttaattacttcttgaagcattgcacgcgcttcatctaagctgcttgctttttcagcaagtacaaccatgtgacttcctaatgttaagcaaagctctgttaaatcttcagggccttcgccttttaacgtgtcgatagcttctttcacttcaagcgcattaccaaccgcaaatcctagaggctggctcatatctgaaatgattgcttttgtgtttcggcctacgccttttccgatttcaaccattgcttttgctaattcttcagcgtcttcaagctttttcataaatgcgccgttccccgtttttacatccaggcaaatggcatctgctccagctgcaattttcttactcataattgagcttgcaattaacggaatcgaatcaaccgttgctgttacatcacgaagcgcataaagttttttatccgccggcgttaagtctccgctttgaccgataacggcaattttatttgtatttactaaacgaatgaattcttcgtttgtaatttcaacgtggaagccaggcactgcttcaagtttgtcaatcgtaccgccagtgtgtcctaagccgcggccagacattttggcaaccggtacatcaaccgcagctactaaaggtcctaatacaagtgttgttgtatcacctacgccgcctgtgctgtgtttgtctactttaataccttcaatttttgataagtcgatttgatcgccagattcaaccattgcttgcgttaaatttacgcgttcttcctgcgtcattccttgaaagtaaatcgccatcgcaaatgccgatagctgataatcaggtaaatccccttttgtataaccttcgataataaaatcgatttcagctttatttaattcatatccattacgttttttttcaattaagtcaaccattctcatgacgttttccccctaaaagtatctgcatattgtgcatccactaaaacgttttcaacaacttacacccttactatataatagctttgaacaattgtaaacagatatatttacatttgttcaaaaatatttatagcgtttgttttagtgaataaaaaaagacttccgcactcggaagtcttcccttatttttcagcttttatcacaaatgacaacatgattcggtacttattctttacctttttataaggaattaatacatatggctgatcaggcggcgtaaatcgttcaattcctttttggtcagtatcaggagaaaagtacattcttccccaccgtttaatgatatagcctgtggttcctttggcaatcattccatcttttgaaacgtctacttgaaaaggataccggtttcgctgtgcctgcagagatgacgccgaataagatacaatatcttctactatttcaatccgatgaagcttttgctcttgaaaaaacagcgtcttcatctcctttactcttgtttatctaacaaaaagcgcgccgtgaactgatcagtaacgagcacatttgcaaatttcccttgcagcgctccgtaaatgctgtcaattttctgatccccgccggctactaaaatggcgtactctttcttctttagttcttccaaatcaagtccaagcgtccgttcatccaggctttcattgcaaatttgtccatctttatcaaaaaaacgtgaacaaatgtctcctaccgctcgagaggaaatcatctctacatcttgttcggaaaagtagccaagctgaaaaagcagcgaatcggttttaataggtcccgtagtaaagacggcaatattggcttgtttgcctaaatctaaaatgcgcttaatatgacgatccgtttccattgcttttttaactaccacgtgatcgacaatcacaggcaaaggaagatgcataggaggcgtattgtatgcctttccaaataagtacataatttcagaagcatacgtgctcgtttccgaatggcttactccgccttttaactgcacaacctgcacgtcattcacatacttttgttttaaatcgatggccacttgataaagagttgttccccacgtcaccccaataatatctccatcttttacaatgtcatagagatagtcagctgctgccacgcctagatgacttttaataatgtgattttcatattgaggcaccggtgtgacgattgctttttttaaattgaatttttgttcaagctgagaagacaacttttcactattgatagatgaatctacaattttaatttgaacaatgccttcttcttttgctgtctgcagcaatcgagaaaccgtgggccttgatacaccaagcttttttgcaatttcactttgattataatcaagaatataatacatccttgccgcttcaatcactttattaaatttctcttgatccatctccatcgacttgttctcccttacctcatgaatttcttatcccaattttaccaaacttatgtctttagtttacttgtttggtgaacaaaatttcaagaggggattttgtaactgagatgaaaagagaaatactcggggctatggagaccagttttctacgtatccattcattccagcatactcataaagagcttctaacttacgctccgaataatagttaaaatcattgtgaactgctgttaatttaagattctcattacgaacaaacatcttctcaaggtataagctcttagcaagtttattgctcttttttgtgttgcaactttgacagcttaacaccaaattccacatattatctgattggatataactccatggaataaaatgatctacatgagtagcgatgcgtttatcagaaagaactttcccacaataaaaacattcttttgtttcatatttccaaagtatgttatagaatgcatgcagcgattcgcgttttgaaatattttctactttcaacaagacatcttctaacttatttttgtcattatgcttttctaaaaatttcgccaaatgataattggttaaatgagtaacaatttgtctatatttttgtaaaaaaatatagatactgctattaaactttatgtattctgttcttttgtcaaactcataaatagaagcttccatatctccgtataacgcccctactacataccttgcccccacttttttagttctttctactaactgcaattgaaaattacttggtaaacgatcaaatactactttattggggacaccatgcattaactgaaattcctttaactctttttgaattccagattgtctattgggtgtatttaattgatttaaatcatgatgaataaccaaattccaatatattttagcaaatgaaaaatatacttgatcaaacgtgagtactaaccgattgtcaacgttatataggttttcaattaaagctttcattaatccatatttatacgttgtggtaaagtgaccattagcaaaaaattgattaatgatcttccaaatttcttgttctgttaaataagctttttttatttctcctacttttaaattaaaactcacctgccaccgctcgctcctcccactattgcaccaccaaactacgcttcttctgtttccactaaataaacccgattatcaaacttcccgcgctccttggccttctcctcacgcactttctcaagttgttctggcgtggccccgtgcacagctgctagcgcgtgcataacttctagtaaatctgcaagctcttcaattgcctcttgatgcgttggggcttctatgtactcttgaagttcttcttttgcctttttcgtcagctcatgttgatattcctctcgctgcagcacgcgtgatttgaaggtttttccgctttgttcaataatcgtaggaattttatctcgcactagcttgttataagtaggcattattttccctccatctcttacctttctagtaaactagtatctttcaaattctgcttgatttccgttaaacacatttaaatcaataaacgtttctttacctttatagccgcttaaccgccctttattcgtatactgccaaaacgtccatttcttctgctcttcaagagtaggctttttcacaacatcgcgaatccaaatatcacactcaggatatctgtttttaatatacaagtcatacgctttaggcgtcgtataaagaatgacgcgcttgtcataatgagattcaagacgtttaatcatgctagaaagctccttgtatacatgtttctgagacggaaggttttgttttttatctccgtaaaattctacatcaatcactggaggcaaatcgttatttttaagagagactgctttgataaaattagccgcttgtgtggaacctttgctatcataactaaagaagtgataagctccgatccgcatggttttgcgatttgcttgttcccagttttgtttaaataaaggatcttgaaatgaacttccttccgttgctttaataaaagcaaactgaatatcttgtttactcagcacattccaattaatctccccttgataagaagatacgtctacgccttttacatcatagcggttggcacttatcgcattaggaattacccagcctttactccatagtaaaaatataaagcttacaagaacgactaatataactcctacggcaagaaatcttttgttcttttgatttgctttatctattgtgtttacccccttttttagaaaatacttctaatattctaacataaaaaggattttccaaagcaaaagagcctacaagtctttatttggaaatataaaaaaccacctaaaatcaggcggctcttcttttatgctgcgtcttcagatggttcattatctttggctgcttctataagtaagaaaatagccgttaaaatatgcatgatcatgccgaccacaggaatccacgcaatagcggaacagacaattcccatgatatgccctgtccgaactttgtttgttttaatggcaaatactaaacctacgatatgcaatgcgagcattagaataagcggcgtgtaggctaggcttataaccaaggtgccacctagaagtggaatcccccaaagggcctccaatcctccgctgacccatttcaatatacgacttgcttttcccattgtatcctccccctttgtcttcaatgtatgcaaagaggttttgtttctgaacgtttgtatatgaaaaaagtggcaaaaatacgtgtactaaaaataaatcgatagtcccatataaagatacgtttttatacgggactagtgtaatagtggaaaatgaatgagaggaaaaggcgttgttttacatgtaataacgaggagctcttcggaaagagaacgaattaaacataaacaaaaaagccgaactcaaaatgtaagctcggctttttcttatataacaaatagaagtattataaaatgtttgtcgtattagtgttctcgactcttctcaaatttttcaacagcttcaaaatcaagctcggctgatatccaatcgcctttttccgggaattctagatttcgaacgactattttattcggcccttttttttctaaaatttttgcctggaagtttttgtacataactacttctcgttctttgatatctgtccacaacaagtgcagaacccctttcaactttaagaagttaatatttcgaaacactgttttacattttattatattttttttgatttgttaatttttttgtcttgttttttataaaaaaatgatccaaacgcttttttctactataatatacccaaaatatcttttaacctttaaatatttatgttatatttttaaaattgtattacaagttttttgtttttgccttttcgtttctcctcttttcttctttttacatattcataatagacatatcaatctatactaatacgtatcaaggtttaaaagttcaaaaatatcttaccatactaaaaagcattgggttgtcccactagaaatccaatcgaatttacaaaactccaccgaaaaaactagaaacctttagccatacaaaagactgcttttaccgcatttatattttaatgaatactaccaacacaatttgaggtgcccacaatgaacgtattaacacacgctataattatcttattagcttatttaattgggtcaattccttttgctttagtgattggaaagggcttttacaaaaccgatgttcgcaagcacggaagcggtaacttaggagccactaatacctttcgtactttaggaaagaaagcaggtattatagtattgattggagatatagcaaaaggttcgctagctgtctgtttaccgcttatgatgaatagtcacttgcatatgcttgtccctggatttatcgctattcttggacatagctatcctgtttttgcaaggtttaaaggaggaaaatctgtagcgactgcggctggtgtattccttgcattttcaccattagctttcattctaggaattcttgcttttttaatttctctcaaaatttctaaatacgtatccttatcttcacctattggcgcattggttgcctttttaacatcaatttatgtaggtgatgtagttttaatggtatttgcagccattatttttgttttcattacatggaagcatattaaaaacttcaaacgtattaaattaggtacagaacctaaggttaatttttaaacgtactaaagttagtaatctttaaatggtgtgaccaaaaaggtgttcatgagttgaacacctttttaattattttagtacgtcttgtcccaagatagacgtaaattatgaaatttctttaaaaatgctcttggttatagcctaaacaatacatttcgctgcttcctatatctcattttgtaatttgatatttactatttaaccaccttaaaacgatgagtgttacggcaccagcagctagatataagaaacctccaacttctattacatacccaaaaggtggaataagctttggtaaaaaaaccatcccggcaagagaaataaaaattaagacaaagagtagaaaaaagtccttaatcttattcgaaattttgtaaacagatttttgtatccattttaaaagcagaaaaacatcaagagaaataatagctgcaacaataacaaaggtgacgattgctgttccgatataaacagtctggctgctatccttaacataatgtacaacgatatttcctatcccgcttactatagccatcaagcttgctagctgtaacaataaaaagcttataaaaaaagcagtgctttttaagggttctttaggtaactgtttaatcatttcatcacagtacgtcctaagattctctccaaacacctcttcagcacgcttcccttccgcttgtgcgtcaataaggtgatctaaaagctccatcaataactcttcagcctgctgttcagaaactgacacactcgttcgaatgtaaacaagcatattatcatagtactcttcattttccttggtcagctcttttcgcttcttattatttaattgaattaattccttagcgttcatcgtaaaaactcctattcaacaatttatctacagggttttgaatgttgatccattcctcttggatttcacataatgcgctctcaccagatgccgtaagatgatagtactttcgtttaggacccgaaggcgatgctttcatttctccctttattaatccctccttttgaagacgtagtaaaattgggtaaatcgaaccttcactcacatcatttaatccatattgttgaagcttctgagatagctcatagccataaaccgtttctttttgaatgattgataagatacacccttctaaaattccttttaacaattgacttctcaaagacatatcgatttcttccttttcactatcttgttatacaagatacatttttaaagtaaagctaccttgcaagacaagatagctttatatcactcataataacctatttatggtaaatattcaaccatttatttactttttttattaaaccacttaacatagtaatctttttagtaaatttgaataaataaatgaaacctttcctctctactaaccgtatacctatcatgcacgtattagttaaaggaggaagacttgtgctaaaacgaatttcactgtttattttcgttaatattttagtattaattacaatcacaacgattacatctttattaggtgttcaaagctatatgggaagcagcggttacggcggcctgctggcatttagcgtaattgccggcttcagcggcgcgattatttctcttatgatgtcacgcgtgatggcaaagtggatgatgggtgttcaagttattgatgaacgttcccctcaaggtgaatacgaacggtttgttctagaagaaacgcaccgacttgcatctgttgcaggattaagaaaaatgcctcaggtcggaatttatcattcagcggaagttaacgcttttgcaactgggccaagtaaaagacgctcgcttgttgccgtttcaagcggaatgctcgaacgaatggaccgcgatgcgatcagcggcgttatcgctcacgaaatagcgcatattaaaagcggtgatatggtcacaactacgcttctgcaaggagtattaaatacatttgttattttcttctctcgtttagtagccaaagcggtgtcaaactttgtgcgagaagagtttgcgatggttgtttatttccttacatcgattgtatttgagattctctttagtatcttaagcagcccaattatcttctggcattcaagaagacgtgaattcaaagccgatgagcttgcagctaaactcggtggtaaagaaaaaatgatttatgcgttagaatcgcttcgtcatactacttcattagtagatgaccgtcaaaaatccattgctgcttttaaaattagcggcaaagaaaaattctcacgcttattttctactcacccgccgctcgaaaaacgcattgagcgcttgcattcactataagcacacaaaaccagcttctttaaagaagctggtttttttatgttatgactgaggagcaagcacacgtgtagtttcccacagcaagacgccttcttcattttttgttaattcaacgtatccttctttctctaaatacgtaagctggccgtacacttccgagaaaatgaagtccggtgctttttgatacatatccgggaaaaaagctgcgctgacttcaagcgttgttttctttccttcccccatcgcttgtaacacgcgcagcgcccatttatgctgcttttgaatacgttccataattaaagaatgaatgtcactaagcggttcaccatgtccgctgtagatcaaatcaatgtcatagttcaatgttttttctagagacgctaagtagtccaatagcggcgtaggcttaggattttggattgtaaaacatcagctgactcaaggagtgtcccggcgtttcaatcacttcccaatcactagcatagggaagtgtatctccttctttcaaataccctgctagcttctgccctttaggtgaatatacttgaattgcagccgttgctttacgaagccatgtatccattacatcatcactgactccaaactccataagaaaattacggtatagctcattatgctgctgaacaaactcttcatcttggtaaatccaaggctccacaagcttatgaccgtaaaccggtatatcactcggtagccattctaaaaatccagtgtgatcgggatgctgatgagtaagaatcacttgttcaatgtctgttactttatatccttctttacgaagcgcctcttcaaaaacattccacgcttctttggttttcatccctgcatcaattaacgttaccttgtctgcttttaataaaaacacattcactggtccaattggaaatggcgtaggcagctcaatgcgtatcactttatgatctaaactcattttaccaaacccctatatctgcattctttttactgctttatactgttaaacgttttattcttttaaatagtcaaattcctgctaacttctaccttttgcaaaagtgcgctgagcatcaataattagatgactctttgtactcgtacaaacattttacataaactcatactattaatagtttagcaggtttgaagacaaattgataaaggaatgctttccattgtacttatttaaaacgaacaaatggttcatcaaacgaaaaaagtaagatagaataaagagatgaaatgatggtatagggagcatagtttatgattaaagcgatttttctttttatcctagcgggtcttgctgaaattggtggaggctatctgatttggcagtggcagcgcgaaggagcatcaagctggttaggacttctgggcggtattgctttggtgctgtacggcgtcattgctacgtggcagtcgttcccggactttggacgtgtatatgcagcttacggcggtatttttattgttttaagcctgttttgggcgtggtgggttgataaaaaaatgcccgatacatatgattggattggcggacttgtgtgtctgattggcgtagccgttatgctttggccaagaagttaagtgagagcgcagaaagcggcagaatacatgaattctgccgccttttatttttttagataaatacagctatattgccagtttatgtactcacaaaaaagacaacccaaaggttgtcttttccattacttcaactcagcccatcttttatctaatgattttaacagctcatcttcagatgtttggccgccgatgtattcttgtacatccgctccaaatttttgcgttacgccttcagggaattttgtccattcccaaggaagcgttttttgatccttagaatatttaagaagttcttcgcctaaaggtccaatgtcttttgcttcaattgatttaaaagctggaatgtacttaaagtcttctactaacgctttttggccttctttagatgtgaccatccagtttaagaagtcttttgctgcttttttatctgccgctggtgcttgtttgtgaataacccagttgcttggaacgtcgattgcaagcttgtcagctacagctacatcatcgcttaacggcataggtagaatacctacatccatgttcggcgtaattttattaagcattggctgaatccagtttccttgctgaatcatcgctgcttcaccgttcgcaaacttcgttacttgcgtgttgtagtccgtcgttaacggatttttgtttccgtattttaccgttaaatcaagcagctttacatactgtttgaactgctcgtttcctgcgattttcgtactgccgtcatttaaccctttaataaatgcatccggatctttttgactagcaaatggaatatttaagccgtggtttccaagcacccaccactcgccgtagccgatagaaaatggcgtaataccggcagcttttagctttttagccgctgcttctaattctgaatatgtttttgggagttctttgatgcctgcttttttgaacagttttttgttatatgtaaatccatagccttcaagactgattggctgtccatatactttaccgtccatcgtcattggtgtaagtgtattttcgtacgcatcatcaatccaaggctgatcggataaatcttccaatttatttttccacgtttttgcctcttgatatcccccgtttgtgaaaaggtcaggtgcattacccgacgcaaactgcgcttttaaagctgctgcaccgtcagctcctccaccgaccgtttggatattgaacttcacatttggatgttcttttgtgtattgatcagttagagcttttagctgatcagcgatttctacttttccttgaaatacatctactactacttgatctccgccgctttttttattacccgatgcgctttcgtttgaacacgcggttgaaaataaaagcgtagccgataaaacgcctgctgctaaaggccattttttcattttaaatgccattttccgttcctccctatttgctgctgattttgacgcctcagcatcaaaatcagccctgttgccgtttctattatttaattgaaccgcttgtaattcctttaacaatgtgtttttgcattgcaaagaagaagattaatagcgggataatactgattacaagtgctgctagtgctaaatcccactgctttgtatactgaccaaagaagaagaatgtcgcaagtggaatcgttcttagctcaggatcttgcagaacaagagacggaagtaagaagtcattccaaatccataggctgtttaagataactacggttactgtaattggttttaataacgggaacacaattctccagaatacgcctagacgtgagcatccgtcgatgattgcggcttcttctagctcaactggaattcctttaataaatccgtggtataagaaaatcgtcataccagaaccaaagcctaaatacatgatcacaataccccagatgctgtttaatagatttaagtttcctgctacttttacaagcggaatcatgatggattgaaacggaataaccattgccgctacgaatgccataaagataatgctgctgatttttttctttgttcgaaccagcatgtaagctgccattgaacagaagatgactagaactgcgttactaatgactgtaatgatcagcgagttgctaagcacttttaagtaattcatttggttgaatgcattaacaaagttttgaaactgaattgttgtcggcagtgccgatgtgtttgataaaatttctgcaaatgacttcagtgagtttgaaagcacgtaataaaatggaaccaagaacactagtccaagcaggactgctaaaatttcaacaataaaggttttgctcgtatatttgtttcccatcacgattcaacctccttcttcttggtgtatgttacttgaataattgtaattgctgctacgacgatgaagaaaattaaggcttttgcttcacctagaccgtatctgttattaacaaatgcttctgtataaatgttaagcgctaacatttctgttgatttgaatggaccaccgtttgttaatgataagttgacatcaaatactttgaatgaccatgaaatcgttaagaataaacaaaccgttactgccggtgctaccattggaattgtaatgtgacgaagaatttgccatctgcttgctccgtcaatttttgctgcttcaattagctcttgcggtacgttttgcagtgctgctgtgtaaataagcatgatatagcctgctccttgccatacacttacaatcacgatgccccaaaatgctgtttttgcgtctcccaaccaaggaagttcaaaaagcgaaattcccgtgatttgtccgatagatgcaaatccttttacaaaaatgaactgccatacaaatcctagtaaaagtccgccaattaaattcggcataaagaaaaccgtacgtaaaatgtttcgtgtttttaacatttgagtaacaaggattgctaacacgaacccaaccacattcgttaagataatcgcaacgaccgtatattttgttgtgacccaaaacgattgctgaaactgcttatcttcggtgaacaagtatttaaagttatcaagtcccacccagttaatcgtaccgtttactccgttccagtctgtaaatgagtaataaatccctgtaaaaaatggtataagtacaatcacacaaaacgctaaaagtgcgggccctacaaatagagcaaataaacctacatttttcaaatttttacgtttttttgtattaatggatggttctcttttaagttcttgctctaaaggaacatattctgtctcctgtaatttactttggctattcatcttactagcacctccctatgtcttattttagcgaaatcagttatttatgaaaccgctttaattgacgagtagggtgtaaaatattgacctttgtgcaacattttctcctcggtgcacattttacgcccttttttacaacatgaaagaaataaaagaaaaagctagaagtggacgacgtatcttcttatcttatacactaaaaaaaagatgtagttgggaggaacatacgcatgacagccaaacgagcgttaattacgggtgccaattctggaatggggctggccacaacgattgaactagctaaaaaaggattcgaagtcattatggtatgccgaaatgaagaaagaggaaatacggctttagaagaagcgaagcgtcaaagcggatcggattccatatctcttatgacctgtgacttagcttctctcgctagtatccgggctttcagtgatgactttacgtctcgctacagtgtgcttgatgtgctgattaataacgcgggcgtcgtgacagttaagcgggaaacaacgcaagacggattcgaaatgatgcttggtgtcaatcatttgggtcactttttattaactaatttacttttagatccgctgaaaaaatctcagcaaggacgcattctaaacgttgggtccggtgctcataaagctggaaaaatagacttcaacaaccctcacttaacaacaggattcggaatatggcgaggatactctcagtctaaattagcgaataatttatttacggtccatttaagtaaaaagctaaaagatacttctgtaaccgtaaattgcctacaccccggtgcagtctctaccgctatcggcgttaatcgtcaaacgggttttggaaaaagcgttcacgccgtgcttcgccctttctttttaacacctcttcaaggtgccgaaacagctatttatttagcagacagccctgaagtgacgcatattagcggcgcttacttttataaaaaacgcgttacgcccccttcttcaagagcaaaaaatgaacggcttgcagaagaattctggaattggagtgcacgcgaagttggcttataatgtagaataaaaaaaggtcagcttttcagctgacctttgcgtattagaaaaacgttagtcctatagcaaaaataaagcctgatacaattaaggtcgtcacgcagtagcccattatatcgcgcgctccgagccctgcgatagctagtgcgggcagtgcccaaaacggctgcgccatattcatccatgcttctccgtaggcaatggccatcgcagcgactcccggatctacgccgagctgttcagctgccggcataataaaaggtccttgtacaacccagtgtcctcctccagacggaacaaaaaagttcacaacgccagaacttaaaaacgcaagaaacggaaatgtcgtttcatttgaaatcgagataaacgcgttcgttagcttcccgcctaagcctgatagctccatcatgccttgaatacctgcgtagaatggaaactgaatcaaaatcccagcggttcctttcgcagcattagaaacggcattcatataggataaaggcgtgcggtgaagtaaaatacccgttgcaaaaaacaataaattcactgtgttaatatccattttaaaaccgtttgtagcaaaataataaattaaatatgaatacccaagaagcgctatcgtcagacttaaaaacctgctgttctccatgcgtacagcaaatgttggcttagaagaagttgtctcaacaactgtagccggagccatttcatcttccgccaacagtcttggatcaatttctaccacttcttttcccgtcggcatcatcagtcttgtcataataggaaggacaattaataacccgagggtaataaataagttgtaccctgtaaaaatcgtgtctgacagcggaataagtccagccgttttttccattgggtttccaggtgtagcagcgacaagaggaatagaacccgacaagcctccgtgccatgttaaaaaccctatgtaagcacaggcaattaaaaaccggtaatcagatcccggcacgcgcttcgctacttctttcgcaaacagcgcacctacaattaagccaaacccccagttaatcatacaggccatagctgcgccgagcgtgaccagaattaccccttgcgccggagttttggctagcagtgctatgttcacaagccacttctttacaagcggcgagctagcaagcgcatgccctgtgacaagcactaagctcatttgcatcgcaaatgccagaaggttccaaaagccgcttccccaaaactgaaccatttcaatcggcccgtgaggagtaaaaacaatacctgatacaaataaaattagcgtcaggattaaagcaaatacaaacggatcaggtaaaaagcgctgcacaagcgccgtaaagaaattagataacgctttcattttactcctcctttacaggaatactcctgtgaataaatgtcgacaagcatctttaattatacataatttgttgaaaattgttaatatttagtttaaataaaaaacccttctgttttccagaaaggttttacacactaaacgtttgaataagagttggctctccgtcaagttcaattttcttttcttgaaaggaaatatgtaagctttcataaatatgtttccaaaatgaaatagcccgcttattgcctgcaagctcaataatcatatacgttccttttcgatgagagaaaatgtcttttaccgttttggaagcgatgccctgccctcggtatttgtttaagataaaaaaatcattgatgcagtaatctgcttcctgctgaagtgcgggctgttcaagaagtaaaaaaaagcccgtcagcttatcatctactttaataaagtatggcgagaggccttctactttccaaaacagaggcagctcttcaaaatggaaagctccatcttcgcgaatatctaaagaaggtgtatacgcagataaatcgtggagataaagagaatacaaattttgcaaaacgcccgcttggcttttaggtactttttcaatcgtaagcattcctagttcatctccttcttttcctatcataagggttttttgtgaaagtttacagtaaaaatgtttgaggcaaagtgaagatggatagtcaaaaagctattttttcattttgtagatgtatgaaacgcaataaaaaaacgatcatctccggtactgtacgctccgtctgataatcgttttttatgttttgtttgctgatgctgaagtttttccttctttgttttggttttgcgcgtttccatgtctgcaaatataaacaggctgcggtttaattctggatttcgctttccttcacgcgtcattttatcacgcattttttttgcttttgactttgccatgtaacttcctccctatataaacgatgtatacatatcttactgcttttttataaaatgtcaagttcagaagcactgatgtgttaacagtgcttctgtatagtcatgactctttatttttcagcatatcgtctaatttttgctccatacgctgaagccttttttcatttgccccctgcttttgaatcaacctttttaagcctataataaatgcaattattactcctgctattcctatcaggataagcagcataagaatttgaaaaatcatatcacctatattaaccatagttccacctttaatctatttttttacattatatattttttttggttacttttgttttattttataaaaaaagctctcaatgctgagagcctcatttactatcttcatcgtaaactgtccacttttcctgtttgatttgattggaaacatcaatcagcttatttttcactcggtccttttccggtcctgttaaaggcgtaggtcggtagtcgtttcgcactgttgtggaagaaatacggaatggaatgacgttgatgtctttattcgtcgttagctttccatctttaatcgtaaacttctgctgaaatacaaatgtatctttatcacttggatttttgtttccgccaaacataaagtttcctaagctatagacaataaatttatttttgtactcttcaattccttgaacaacatgaggatgatgacctaaaattaaatctgctccgttatcaattgtatactttgccaatgcttgctgcgctgtatcaggaacatagtgtcgttcagacccccagtggaaatgtacaatgataattttagctcctttttcttttaaagacttaattccgtctttaatctggcttcttatttctttggtgtcatcccagcccggatatccaagcaacccaactttgactccttttaccgtggtgacgtatgtatcttcatagccaaaataacctattccgctttttttcaaattctctcttgtatcatcatatccttgctgtaaataatcacgtgtatgattattagctaagttaacggtttcaatacttccttgttttaaaatattcacaaaagaaggatcacctttaaaacgaaatgttttacttgctttttcagtcgcagttgtcagcgtcgtttctaaattaaccgttgttaaatcatcttgttcaaaaatcgactttacattttgcgtaaaatacggaaggccatttcttgccgctacgtcattaaaagtagaatcatagctgaaactttcatcatttcccaaagtaaaatctcccgctgcgctaattttaatggttgtattaatgccctcttttttctctttttttgtcgctttttctttagattttacagcttcttcttttttctgcggttcagaagatgtttgttctcctgctcctccgcacgctcccagtaaaaaacacaaacttccataaataacagctttttttaaatacttgttcatgtaacgttaaaacccctttttacgttttaataactgtgtttggacatggtgtttaatgttcatttcgccaaatacatacaatcttcctgttatatcggcaaaataagtgaaatttttataaaaaaaggaaattccaatcttctttttgagttaaaacaagagtttttttaatacaagtgctatgaagaaagctgatgatctttgataaacgtcaaggaatttacaaaaatatagaggttttcaaacatcacctaaaataaaaaacctcctttgctcatgcaaagaaggttttatctaaacttaacaaatcgaatcattagatttagggtttttgagtccaaatatcggtcggataaatattgctaatcctgtgccaagcatcgccataaccatccatacccatccatgaagactaaatgaagcaatgccgccaaagtaagcgccgatgttacagccaaaagcaagacgcgcaccataccccattaaaaggccgccaacaacagctgctcccgcaactccgggcttaatctttcctggtttgaacgtcccttgcgccgtcgctgaaatgaaggcccctagtataatcccaaagtttaacacgctggtagagtctgctagcacactttgcgttagcgcttctccatttgcaccttggaaaaatccccagctcgatacatctatcccggctgccatcatggcttttccaccccataatgcaaaagcagaagtgattccccaagggtttcctcttacagcaagcgtcaatgcatttaatacggccagcacaatcgctgctgtgaatagaggccaagagccgcgaataatctttgtccacccttttgtagtaggaagctgtttcatcataggcggatttttctttttggcaatttgaatcgtaatccagtaaatcgctgcgaacgcgataagctgtataatccaagctccaaaataaccaagacctgtcgattcagctaatgagatagggggaagcgaaggttgcttttgccaaaatggcaaatgatacgccccaaacatagaacctacaataaaggctaaaagcgttaaaatcatagaagaagagccgccgcctaacgaatacagcgtccctgaggcacatccatttcctaactgcatgccaattccaaacataaacgaaccaactatcacgcttactcctacaggtgaaacatatccttttggcgttacccctgtaaagctaaagcctgtacttaaaataatagcaaacaatgttgacgcaattgcaagcataagcatatgcgcttgcaagccttgaacattgccgacagatacaaggcggcgaaatgctgatgtaaagccaaaacgtgcgtatagaagcgtcatccctaacgctaggccgataataaataaaacaccttgcgtccaattagtcgtgagcacaatcgcaagaaataaaataactgctgctataacccctcctgcaaataatggcttttgcatagggcttaattctgttacaacagtagtcggctttgatttatatgatgagtgcaacgtttgtaccacatcatcaactccttttctgatagaaatactaagaattaatatttatcatcttatagcacttcccttctcctgtaaactgtttagcaaaatgaaagtgaattgtttattttttaaattttcttacctttagtcatacgaaaagcagaagtttctattcttctgcttttcgctgctaaacgtaaatagaatgaatctcttttaccggagtaggatgaggctttgcaaaataatacccttgaaacaaatcatatcccatctctatcaggcattttaaatcttcttctgtctctaccccttccgcaagagccttcgcccccattttatgagtgatagctaacatctcttgggccacttttttctgtttctcatttttactgactccctttgtgaattcaaatgctaacttcaccacgtcaggctccacttctaaaagcctcttcagcgtgttataaccaacccctacgtcatctaaagcatatttaaatccatgggaacgataataattcaaaatgttttttaaatgctcaatatcttgaacatcctccgtttcaatcacttcaaacactatttgctcgggttttatattcaattcttgaattaacgcaaatgtagatgccaagcaatgctcgggattatatattgctgtaggaataaagttaataaaaatcagctgacgatcaataatactagcattttttacagcttctaagcggcaggctcggtcaagagcgaaggttttatttcttatttgagcagcttcaaacattttaaaaggcggtataatacttccgtcttcttctaatcctcttgataaaatttcgtgcccaacgatatgcacgcgttcgtgatcaatcgatacaatcggctgataatatgagcaaattcgcttgtcttcaatcagctcatcaatccacaaggcatctttcattttttgaaaaacggtgattggctccataccccccaggttttcaaacgggctccgctgcttggcttctacagcccacacatgccgagggtctagatgctgatgaacataatccataaaactccaaaagatatcttccctcatccagaacatatcttctccaagagtcttccattgattttgagaaatatctttaaagtatttttccaatttcttcacatcgtttgacttctgaaaagaaaccgtatatcctgtcctaattggcagacacccgtcgcaccccatagttcatcttctccctcatttatcatcagttttttgtatgtaaacatggataattctaggaactataccacttttaagaaatttgcaaaccctattttccctttaaaatagaacgtactaaaaagttttggtaaaatggtagacggcttttattatctagatcatagaagaacttgatataaggaagtgaacaatgcatgagcaaaaaccgttttacgaagtggtttttattttctctaatactctttgccttaagtaccggagcaatgtattatatgctgtacatatcgtactggacgtattctattaagctgtttttaatcgcggtaccactcttcaccttattatcggttgcttttggttcgttggtaatcatccatgagcgcaaaagaaaacgtgtatttcagctgcaaaatgaaggagccagtcctaaaagtacgtttattcaaggattttccgaaataacggtaggagcaggatgcatcgtgctgtgcttttttctttttctttattttctaatggattattgagtacatataaaaaagacgagcaggcagctcgtctttttttatttggatctttctagaatatctcgaacgcttgcatagtcaagctctttataagtgccaacacctggttttacaaaggtcttttcaacaatcgcatcaaattcacgatcatcaatatcatagtcacgcaagctgttcggggctcctaagtcattccagaaagtgcgaagcgcttttgctccttccattgctgtttcttcatcgctttttcctgctggatcaatgccaaatacgtttacagccaattgttttacacgggaagggtcttcttttaagacgtgctccagccagttagggaacaagatagcaagaccgcctccgtggggaatatcatatacagccgacagagcatgttcgatacggtgagtagcccagtctcccccgtccgttccgtttgctaagcttccgttaaacgccgtcgtgctgatatacatcatcgtttcacgatacttataagaagtcaggtctttaagaagcttaggaccttcttgtacagccgttcttagtaaagattcaataaagccgtcgatcatcggcgtattttccgtgcgatgaaaatagtgttcaagcgcatgcgacatactgtcaacaattccatagacggtttgatcgcgcggcactgaaaatgtgtacgccggatctaaaatagaaaagaggggaaatacgtgagaagacgtccatccgagcttttcttttgtttcccaatttgttataacagaagttgaattcatttcagacccagttgctgcaagtgttaataccgttccaaaaggaagcgcatctgtaatctcttttttacgtgtaattaaatcccatgtatttccttcatacacggctccagctgcaatagcttttgtacaatcgattacacttcctcccccaacggctaaaagaaaatcaatgttttcttttttacatatatccacgcctctagctactgtagtcaaacgaggattaggttctacaccagacagctcgtgaacaaccgcgttaatagactgaagttcagctttcacttcgtcgtatacgccgtttcgtttgatacttcctcctccgtatactaacagaacgtttacttgtttatgataagaagcaagctcttgcgatagcttcgtaatttgattttttccaaagtataattttgtaggattgtgctgcaaaaatatattcatgttctacacctctagtttcatgttttataaaaagtgtagcacgaaaactacttcatcattattgaagattctctatatctattatcaatatttttgataaccttcttgaacaagtgaaataaattgttgaataggtgccgtcagccattttttctttttgaatatgagctgtgaataaagataaaattcttcgtggtcaaacgggactttaatcagttttccactttccatctcttgttttaccgctatttccggtacaagagcaatacctaaattatccgctacgcactgtttaatcgcttcaagactgctaaacgagatgaccgattgcatatgaataccgctgctgcgcatcatctcttctaaaagcgtgcgataagggcagccgctctcagttaaaataatggtctctccctcaaactcttccattagaacgctgtttcttttactaaaagaatgagaagacgaagcaatcataaccatgttttcttttcgaataggaatcacttctaaacttgaagatgtttgaaggcgatcaagcaaaacggctacatcatactttccgtcaataattccttgtgttaaatttggacataaacccgcttctagcataatctttagagaagggtgctgtttttttaattcacgaatatacggtgtaataaaataggcggccagcgactccacggttcctattgaaacggttcctctagcatcttcgttcgtagtaaggcgctcttttgcttcatttaataactcggttacttgattcacataataaagcaattcttcaccaggctgagtcagcttcattttttgtcctgttcgttcaaatagtttttgaccgtaatgatcctctaatttttttatatgagtggtaacgcttgactgagcataccctaactcctcgcccgttcgtgtatagctcccccacttcgctacttctttgaatgtatataaatagttaatatccatatgctgctccttatgtactgctgtttggtttcgttgtccatatgttaaagctgttctagtaattagaacttatacgtaaatagaatcacagtacagtataagcgaactcgttttgccaagcaattttatcaaccttaaaaattctttttatattaggcaattacgccgttttttgttcatagaatgaaaaacaaacctatgaaaagaaagggtgtatctcatgacagcctacaaagaagtgttatataaaggaaaacgctttgtactgattcacgtatatgattcaggatactgtgaaatccgaccgattgatcatgcttttaaagtcgaacttgtgcgagtagatgagatagaacaatgtggataacaatcatgaacgcagctaatgcagctgcttttttatttgtattaaaaacaagtggatgagataaaaatagctgaattggctggccttttacataatttcttcctgtatactttgtaactaaggatattcgcacttatttagtttctatacttactcgaggtgattacatgaaaaaaggctggctggaatggatattattatccgtggcgttaatttggggagccaattatgcaatcggaaaatttggagttgctcatatgtcttccattcaatttagcgcactgcgttttataatggttgctcctattcttttacttattacaggaataatagagcgaggcattcggatcgaaaaaaaagactggggacgcttaatagcggtcagtatagtaggcgttacgctctatcaaacgctgtttatggtatctgttaagtatacgacagctacaaatgcttctttacttatttcgatgtctcctattttcacaggaatcctagctatattatataagcatgaagctttttcgttaaaaacacagctaggctctgtgcttgcttttttcggggctgcgtttgtactgctgtttggtcactctagtcatgcgctgtcgcagcttgcatggttcggaaacatcatggggattgtcgcagccattgcttggggctggtacccgattttagcaaaacctttagtcgtaaaatattctgctttgcgcgtgactgcctggtctgctttaatcggagctattccgcttactgtctactgtcttttcacctatcaaacacttgtatggccaacagatataggcagctggagctctctggcatactctgttttgttcgtgacggtttacggactggtgatgtggtatgtaggaattggaaaaattggctctacaaaagtaatggtctacatgtatgttattcctttgttcgccgttgtttttgctgctgtagctatcggagagaccatcaatgctatgcagctgcttggaggacttattatttttagcggtttgtatattgtcaaaaaaagccctgctcctaaaacagctcttaaacttaaaagagcaaactaaaaagagtaacgggttcggttgatacggaaaaaatgctaaaatagatgcaaatgaaaacataattagcatctattttaatagtgaattagcaatatgaatggtaatgaataacgctcagattttttctgagcgttattcgtatattactttaatgtcctaaacttaattaaacgcccgttggtttgattaatgaacatttagtatatggatttttagtttatattcatgagtgattttatgttgattgtatacgcgtttaaagccgtttcgttcataaaataacttggcttcgtccatatctgtatataagacgagagtgtcataatagttcctgcatagtgaatggtttcttttaaaagttgtttgcctacaccctttctacgaaactgagctgaaacataaaaccttcttactcttctaacgttagcatactgactgttaggattttgattaaggccggctacgccaattaatttgtttttttcaccgtaaacttcccacaatctttcgcctattttgttaaatacgttttgcccgtttttatactccactattagcttggtaagaaagcaaaagccttcctcctggctttctattaacagctcttttatatcatgctccacaagctacgttatcctaatgattctcatatacctcctctccgttcagcaggtgtcttgtctatttcgatagaatgcttgttatacattaatcctgccatgcctattagagccgttaaaagtaacatgaagcttgaaaatagatatacaaaccttaccccaaacaggtcggctactgtccctacaaatgctatggaaagtataaatacagcctgtacaagagttgattttgccgctattactttaggaagcatcccgttgctgcaggtattttgataaatggtttcctgagctacatctcgaagctgataggcaggacccatcattatcaaaagtactaaagctagatacgggttcgttactagaccgtaaaacccggttaaaacagcataaccgagtgagcctgcgaacataaaaagcaaaagccttccttttaccatagaagacattcggtacacaataattcctccaactatgcttccaaaataatacgcaccgtttatatacccccaccacgcttctcctttttcaagcacttctttcacaaaagaaagagtaatagctccaatccaaatggttccaaaaagcgactcgatgatgtccattataacgagggctctgatgcgtttatgtatccataaaaagcgccatccttccattaattttgccgctcttcgcttttgtgtttgtttatatgtatgggtttcttttataaacagtaagcaaacaaatgagatcgatagaagacctgccgttataaatagagactgagtggatcccgttaaggacaaaacgaaaccaccaagcgaccaccctgcaaacagaaaagtctgatcaattgttgaaagcaagctattcgcctgcattctttgactatcatttactaagctgcgtacaactgacgttttaaaaatggaaaaaaagccgttaaaaaaagaaatgattccaacaatgataaaacccatcgttagtactgtgactgtaaattcttgtgtaagcagcacatacaatccaacaagcatccctatctgcatcacttgaacagaccgcataatgtgaatggatttatacgtatcggctagtaaaggcacgctaaggccgctaaggagccgtgcaagtaagctcgtcatcgtaatcatcgacgcaagaactgttgaaccggtgttttcctttatataggaagtgacagccattgtataaagaacaaaacctacatttgcggttacttgacttgctgctaaaagataaaaacgctgagtcaattcttttctcctttctgttagacgtaacatgcaaaaagagaattcgtttttttgttaatttttcccttttaaactataacactatttgacgaaatccaaaacaatctataatttagtagatggaggtttttatgtttaaatatagttttcttattgttcttatcgcttttttacttattaactttaacggtcaggaaaatcaaattgtaggaggcaaaataaaaaaggaacgaagtgaggttttttttggcgagtacgacagctttacgggctgctactcccggagcattaaactcaaaaaaggtgtaacctacgcttttacgctatctaaaaataccaaaagcggagacctgtccctgtacgtagaagatccaaaacagacacgattttttgaaatgactaataactctctttatttaacacctgaaaaaacgaggagatatcgtattaattttgtaggctctgagcataaaggctcttttcagcttcactggaaaagcagtaatcaaaaagagagcgaaaaatttgtgtaataccattttagacaacgcttaaacgagggggaatggtttatgattattaatcaagctgtcctgtacacccacttattggacacaatgaaggatttttatgtaaattctctcgattttccattaaccgccgcttcaccgcgttctttttccatcaaggttggtgaaagtgagctaacctttaaagaaagttctctacatacaaagcccttttaccattttgcttttaatattccagcaaaccgctttatggaagcaaagcaatgggctactcagagagtcttcctcaatacggaagagaagaaagatgagatttattttgaagcgtttgatgctcattcgttttattttgaagaccctgctcataatattgttgaatacatttcaagacattcggactgcccgtcatccaaggaacccttttcttctaagtcgcttttaagcataggagaaatcaacttgacaactcctcatgtccactctgtaggaacacagcttatcaactccggtatcaccgtacgtaacaacaggctattaaacgctacatttaattttttaggaagcggcagtgcgttttttcttgtagggacgcctaaaagacggtggtttttttcgaaccgagactctgaagttcatccattaatggcaaaggtcaatcattctctaacggttgcgctcgacgaagaaggaatgttgaagattacgcaagaataattgtttttttaataaagccacgtaacaagcgaacttattacgtggttatttttgttcaaaattcagcacatactccccctagaggttttgtatatagttctcgatgtcctttctgttcatcagcataaaaatcttgcaatcctcatcatttttaagctttttaaaccggtttctcatctttttttgccgctctcgatacgtagtaagaataaacgtaaaaaatgaccaatctactttttcagggcatccttttgccatatcttcacgcatttttcttgcatatacgattctccgctttattactcggtacacacaaacgatgagcggcagctctaaataaataatggtatctgcacgcttcactcgcaggtcatacgaattgctgtagttcccgtcgataatccagctgtctttttttacaatttgctcctgcaattctctaaagctatcattgtctctttccttccagccaggctgccaatacaggctgtctaaatgatatacttctagatcaagcttttcccctaatttcttggcaaaggtagactttcctactcctggagaaacgcccattaccagtactcttttcatcttatcaccttacctttttaagaaataaagctgattgaagagaaggcagctgtttatagctgactcggcgcattcagtgtactcggagcgagctgctttataaaacgacttcatgttaggatttttatttccatgattttcaggcaacctataaatattcattataaattcctatattccttcttgctttgtagtaaataggttgcttttatgaatcgtttcctttaccttaaatgtgagtatataaaagtaaggtgaaaaaaatgaatgcatctatgctaaagagatttttacgaaacctcggtatttttatttatattgtcattgcagctattaatatttacttaacaagaaatgatttgggcgatatgcttacccgccttgtgctgctgactattttacttcctttgttttttagttttgtgtatgcgttaggaaaatcacattttaaaagacaagaagagctcgctgaacaagagaagaaaaaagagtaaaaaaagccttttatcgagggggattcccctttttaaaaggctttttactttttttcatacaactgaacattaactacatcaggatgaacgtgatactgtttggcaacttgatttaccatttgctgaatttctcttttcttacgggaagaaaggtgttcgcggggcagaagaatcagaatttgagcttccgcatagttattcagcaccctaacttcttgaaagccatgctgcatcaaaaaagcttttaacgctttttcaaagtctgtgctttctttttgaacaactatagaaggctgattgtaagaaaatagcgaaacctctttctcttcaggctttgtatacaccgtccaagcagttataagcactgtgacagcaatacccagatttaacatccaccttttcataccacgaacgctccttttaattaagtttgttcatgatatgaaaaaattcgttcattcatgcgttatcttcctagccagcctccgtctatagcaagtaagtgcccatgaatataggcagatgcatcagatgctaaaaagacaaccgctcctttaaaatcatctgcttgcccccatctgcctgcgggaatacgttcaatgatttgtctgctgcgcgttttatcgttaataagtgcttcattcatatcagtagcaatataccctggtacaattccattaacatttacgccttttgctgcccattcattagataaagcctttgtaagctgagcaactccgccttttgctgcagcataggccggaacggtaatacctccttggtaagaaagcaaagatgccatattaatgatttttccgcttccttgtttaagcatttggcggcccgcctgctgacataacaaccatacggtttttaaattgacattcataacagcatcccaatcttcctctgcaaagtctacagcgggtgaacgtctttgaatgccagcgttgttcactaaaatatcgagctttccaaaataagcaacaaccgatgagatcgcttcgcttacttcagaagcattttctagatcacaattaacaataaaacattttcttccgagacgttcaatttcttcttttactccaagaaattcctttgatcgctgcagaagagcgatatccgaacctgcttctgccaaagcaatcgccattgatcttccaattcctcttgttgctcccgtaatcgctgctactttaccatctaaagaaaataaatctactgtcattgttcattctcctctccatttggtgcaaataaaaccttaagtgattcatcaggccgctgcataaactcaaaccctgcttgaatatcttcaagctgcagtttatgagaaattaaagaatctgctgctatttcaccgtttgccagtaaatcaatagccgtctgaaaatcttcctttgtataacatctcgttgtagttaatgaaatttctttaaagtgcatcgctgctaaatctacttctggagcgtttttgtatacgcttaccaccacaatctctccttgaatacggcttgtttcaaccatttgttttgctgtaatttgatttccggctacttcaaatacaacgtctgcaccgacgtcattcgtaagcaagcacacttcttttacgacgtcttttttcgctgcatcaattggtataaagccaagttctttcgctttagttaagcgataagaactaatatctgagatcattactttttttgctcctgctcgtttcgcaatcatcccgatcagcagtccaataggtcctgcccctaaaatgacagcttggtcccctattttcaaccgcgagcgtcgtactgtgtgtacggcaaccgctacaggttctgcaagagctgcatgcgggctagacagtttctctggcaagaggtgaaggcggttcactggaacagccacgtactccgcgaaccccccatcttgatcaatgccgattagttttaacttcttacaaacatgaaactgtcctcttacacaggcttcgcacgttctgcagctaagcgtaggctcaactactacgcggtcacctaaagaaaattccgtttcccctcggatctcttctataactccgctgaattcatgtcccataataagtggcgcttgtgctctaggatgttttccaaaataaatcatcatatccgttccgcaaattccagcatgagatacctgtacaagcgcttctccttcttttataaccggtttcgctttttgctgcataacggcttttgtttctgaaacgtagacacctgctttcattttttcatcccctttgtatacttgtcgacaggttaaagataagaagacccaaaaacattttgaatcttttatccctttttttatgcttcattcaaaagtgaagctgttatcgtatttcgcgtatcttcaaagtgacgcttcacttcatcttgaatacgttctgtattttgagactttaatgctttaatcatttcatgatgctgctttatcagtgggagcacagctgctttatcatctcgaaatcttttttcagtggtaattaaaagagcagctaaaataatttcacggatgctttcccacaattttaatatccgtttgtggtctgcttcgataatcacgagctcatgaaaccgtaaatcttgataagcaaactctacatagtcatcgtatttagctgccatgttcatttgatcaatgctttgctcaagctttttaataagcgaatcatggttgacttcagataaacgttctaagacaaaatgttctaaaagcagacgaacatcgtacagctcgtttaaatccctagttgttaaaccaataacaactgctcccattcgctgtaaatcaatgagtccttcgtttgaaagggttcgcagcgcttctcttataggagatcgactcattgcaaactctgccgagagctgattttccgatagtatggctcctttcttcagctcgccgctcataatttgaattcttaatttgcttacaacttgttctcccagcgacgctccgcgaagccatctttccgggtaggttacctttttaatgtgtcatcacttccttagccaacttgtatacaagtattcaagatttagtatatagagaagcaacctaattgtaaacgttttctttatagaacgtatatttttacaattctttcttacactaagaactactgataaataaaaggtgggaagatgaatgaatcaaattatattatgggggattcttgttattccatggtttttactgctgctgcttgataaacagcgtgttaaacgattttttactgtagggttatttgctgcattaatgatgacaatcgcctatcaagtagcggaaaaaatgcactggtggacggttcaagaaaacgtattttttcttactaacatgggagcaacgatttattgccttcatattgtgattacgatctttgtcttttaccttacgtatcctgggtttatcttgtacataattgttaacgttattttagatttgattcatggttatgttattgttccttttctcgctaaaatcgggctttataatctgtatgatatcagtcattttgggcttttccttgtcatgactaccgtagctattatcctttacttgtttcaacggctgcttgactttatatttgaggaaagccttgcataaaaagccacagcaaacgctatggctttttaatcaattaaaaaatggaataaccgtatctccgcgaatcggttcaacggccgcatgaaaccgaattcgcaaactttttgacgtttcgatgtcagaggcatccatgacgtgaaaatgaatgtggggttcggatgaattcccggaatttccacaccttccgagcagcgttcctttacgaaccacgtctccttttttcacagaaaccgatcctttcttcaaatgcgcaagcacactgtattcttttccttcatgctcaatgatgacgtgatttcctaaaggattttttttattcgtatgtccaatttcattatcttcttgaccatcaactgctgtgataacgactccttcaagcggcgctacaactttttttccataggcatagtaatcttcgtttttcattccatcatttttatagctttgctttccttttctcacgactaaatcatacgcatacctttggttttcgactagatggtgatagttcaacacctcatgctttcctccccaatagacaaaccattcactttgaatcggcatcgtatatttgtttgtactccatcgatctctctctgaaaatgattctataggagcaatcacaagtgcttgtataatgttatgttcatcaaacataacgctgatgaattttgtctgcgtagaatttaaccaaataaactgctcaacttgaggagttaaatagagatttgtttctagtctgtagaactgttctccttgattaaacaatttgctctgctccaaaaattgctgaagcgaaacttgacgtttaaattcttcgcttacacaatcataaagtttcttaaaatccccttgtgcaaataaaattccaaactcttctctgatgttcacttttctctctgtatccatcattgtaatccacccttttatatgtatttcaatttgtttgaattatctataagtaatacgttttatgttataaaaaggtttcattttccagttattctatctcaaaatcttcttctataccgtatttacaattttcttaatccattttatacttattttacaaatatttgaaaggaggtgcagcatgatgaaaataacattaaataagaaaatcaagctgcgccgaataagtgtttttggcgcttagattttaaggagatttcacaatgaaagtagcattagtacgtcattacaaagtaaacaaaggtcttccagaaaaccaccgcttatccactgacgaactagtggcttggtttcaggaatatgatgaatcagatattacgtatggagagactgatttgaataatatccaatggaaacgctgtttttcaagcgatatgccgcgagcacacaaaacggcaaagcacatttataaacaagagatcacgcttcttccagaacttagagaaatacctatgcctattattccagtaaaatttaaacttccttttatcctatgggcattactgtttcgcacgtccggactcatcaacaaacaagctcgtaaagatatggctgagactaagagaaaagtagcagcagtgctagatcgcgctatttccgagtcagaagacgatttgctgattgtcagccacggaggaattatgaagtttatgcgtaaagaacttataaaacgcggctttaaagggcctcggtttgatattgctgttaacggaaagctttatttatttgagaaagaataatatttttcatcatttcgaaccgtttcttttaccagccaatttgaagaaaaaaagcgtagacagctcataggcttgtctacgcttctctacacaaaagataaaaggcttatagctgaatttctaattccactaacagagcaagtaatagctcaattaatacttgaatgttgattgcaatttcagtgtctgatacatcgatttttacatttcgtgaatttttaataactgtacgctgtctattaatttgtttgatagatgatttttggaataattcttgtgcaattgactctgcttctgcactgcgtccaatcgcaattgttaaaacaagaacgattgccgcttgtagtgctgcttgtacagataaagccgctttgatgcttgttgtgtttacttcaacgtctgccgaatcgcatataaaaatagtttcttcagaatattgaaccgtttcctctttttgtttcgctacttgattttctctaacagcgttgaatgccggatggctagagccttccaatgcactccatccagatcctccgcattttgtttcttttcttttctttttacctttaaaataatcttctgcttcctcatactcttttttcatataatacttaccctcttcaggattgtaatagctgtagtatttactcatatcaatcacccttctaaaagtttttgtttttttgcaaacccacatgattttcttaattaacactgctttatacccttccggtcatcaacgttcttatttgagtgtatcgttaactttcgattgaagctcagcaacgatttgcttaattttttgtttttgctcaggggataaatttcttagagaattttctgaaacaccatacttttttagtacatcagagattaaagcatcagcaacacggcttgtctgatcactgttaaaagctgaagcgattactttgcgtaaattgctcatataaatatcaactcctgttagaaagattgtgaggtgaagtagctcacctgttaacaatatatgtaatttaaaacaattcgtatagactgatgacagtggacaagcacacattttttgtacaagctttaattaagataaaagatcgtatttataagcacattaaaaagtcgctgagactaatctctgcgactttttaataaccattttcttcaattgttaatgcttcacgcaaagcgatatcttttcggatattatgagcgatttcacgcgtgatttctcctttttcataaagttcttgcaccgtttcccgctcggtatgaaacgctttataacataaatctctcgttgtttttttacgtttgcgtgaattatactccgtactctcttttctaagtcttgccatggatctatggtattcgctaataatagcaagtgaaatcattcgattttcttcattcatattttctttaatgacctttatcgcttcttcaatcatttgaatacgtactttgttcactttgcttcttcttcgcaagctttgttttcttaacgcctgcttattcggtgaaaaaattcggactagtaataataaaacttttttaaacctcatccagctcaccaataatttgtaccttacacgattggttacagccatttcaagcttgtgcgtatgttccaaacaaatatacgctgtctcacggtctattttttcctcttttaatagcttttccaccaatttccccttggcctgaagagccagcaatcgaatttcttcttcatactgtttgttttcagaggcttctaaaggatgagttttaacgatgatattattaatcgttgtattatacgttgaaattaacgaaagggctgctccacgattttcctcggtcatttctctttttaaccgctgaatagcagctttgtgcactttaatgcgtgctttaacctcttttgtattgcgctcaggcttcttcggcgccttttctgttttcgcaatgagaggtaaaagaatacttgccgcaactagggttaacaatataacgcctgctgctagaaaaataatcagagagcgttccggaaaatcactgccgttatcaagcgtatatggaatcgaaaatgctccggctaacgtaaccgctcctcgtacacctgaaaccgtaataatgccaatagaacgaggctcaggttttagatgcttgttatttttgtaataccagcctactgaccatgacaccatcacccaaataaatcgtagtacaagcaaaaagacagtaataatcaaaatataaagaagcacttgtccattattaaagtttggatcttgaataattgctttcgccactttaggtatttgcaaaccaagcagtacaaacaccaagccatttaacaaatataaaataaccgtccaagtactttttgatactactttaagctgctgattaggtgattcttctcggtcgcgctcaatcgcatgcacaatgccgcctgctacaactgccaagattcctgataaatgaaaatgttcagcaatgtagaagacaacaaatggagttagaatttgtattaacatatgaatcgtaatatcttccattcctaaacgtcgaacaagtacacgcagtctgataatcaaaaaagcgataaatgctcctacaaacaaaccgcccagcgctacccaaaggaactgaaatgtagcatctactatcgaaaagacgcccgttacggtagcagctactgctacttgaaacgctacaagaccagaggcatcattcatcagcccttcgccttccagcaaatgcataattcgcttaggcagctttactcggctcgccatagctccaacagccactacatctgttggggacaaaatagcggctagtgcaaatgccgccggtaacggaatggaagggatcagccaattgattaaatatccccctactgccaccgttacaaaaaccagtcccagcgctagtaataaaataggtgtacgaagcttccaaagagcagctcttgacacgtttttcccatcattaaataatagcggggcaataaataaaataaaaaataaatcaggctctaaatgtacatctccaccaaatggcaagatagcaagccctgctcccaaagctatttgaactaatggaacaggaataaatggtacaaaatgattaatgatattagatagaccaatcaaagccaataagactaatatcgtcagaaaaaattccatgaaaacaatcgactcctacttctatttacatccttttaaaggtatcacgttatctcttttcatttattttatagtgtttagtttacgctttttgtgccaaaaaatgttgtgggttattaaaaagtgctctttcttttcggtaagtttatttctacggacattaagggaacagtatacatgatattctttatttaccatataaatcagctcatcaaacttttataagggaggtgttcccttatccgtttcaacggggtaaggagataaatttggaaacagtaaatgtcattttattcatcgtattaattatattaacagccttttttgttgcaacggaatttgccgtcattagggtacggtcgactagaatcgaccagttaattgaagaaggaaaccggaacgctttagcagcaaaaaaagtagtatcaaatttagatggttatctttcagccacacagctgggcattacggttaccgcactgggtctaggctggataggtgaacctacggtaggccatttattagaaccgcttattgacatgcttccttttgctacatcactttcgcatgtcatatcttttgttcttgctttttcggttgtcacatttttaaatgtggtagctggggaacttgcgcccaaaacagtggcgattcaaaaggccgaacaagtgacgctgttattttcccgtcctcttattcttttttctaagttactttatccgtttatttggcttttaaaccactcagcaaggggcgttgtcggattattcggcctgaagccagcttctgaaaacgaagtagctcatagtgaagaagaacttagaattattttatctgaaagctatgagagcggtgaaattaatcaatcggaatttaagttcatgaataatatttttgaatttgataatcgtacagctaaagaaatcatggtgcctcgtacggaaattgttagcgtatcagcagatgaaacgatagaagaattcttaaaaatggctagagtagagcaatatactcgctatccagtagttgtagatggaaacaaagatcaagtggtgggattagttaatattaaagaaatattagcggattacataaaagaagatgatattaaaccacgtaccgtgcaaacgtatatgaaacccatcattcaagtcattgattccatcgccatttacgacttattgcttaaaattcaaaaagacagaattcacatggccatcttaatagacgagtacggaggaacaacagggcttgtaacggtagaagacattttagaagaaattgttggtgaaattcgtgatgaatttgatgatgatgaaataccggacgtacacaaaattagtgaaaatcactacgtactcgatgcgaaggtgttgattgaagaagtaaatgacttactcggaacaaatattgagcaagaagacgttgataccattggcggctggatgctgaccgaaaagtttgatcttgctaaaggtgacagcatcacaaacgaaagtttttcatttaaagtcattgatattgaacatcaccatattaaacgaatcgaaataacaaaggaaaaaagtacggataacagctgattatccgtactttttttgatgctcttttttaaatgtcaagtactctttattctctcgtacctccttccattttttcataaaaatagccgccgattttgctttttgttcatcaatttgccgttcattacgctctccgtctttgctatatttctttccacctttgtagttcgcgtagcgcctggatcgcgtatatcccatttggagaaatttccgggccatgtccattccaacaaaatcgcttttttctttgtaggttaaaaaaagctgataaatggcgtccgcggattcctcagcaatttcaggtgttcgaaaacgccaatgaggaagaatttcacttttatacggctccacaaggagaactccttgttctccttttcctactctatacttttcaggatgttttctaaaatcgatatgctcaaagtcaagtgaataatcaaatgccacggctctcccctcctttttgatctctaccccttacaaatgaatgataaaacttttcttaaagaagttttttacatgcagatgcgggtaataataggtggataagtatgactaacttttttctccatgctaaaagaaggccgaacttattaaatcatggtacgggagctttctatcaaattcgccattatgggaaagaagatgtttccgtgatgtctgctgtcatcaaggcattaaccgtaatcgctgaaacaaatcgctctgccatcaaaaacgacgtgtgggttttctcttcctatatcgtagaagggctgcaaaaagaagagtggcttaaaatggacgaagagtttcttaatcagctgctcaaaaaccttgcaaaagcttgtgaaaaaaaaggcgcttctatgttgatagaataaaagtcaaaaaacgccgctcatcaactgagcggcgttttcttacgatataaggtgctctatctcttctctctttttcactattataagtttatcgttatatgacgtacgaaggatatgcaaaatttcaggtttactttgcttttcgaaatccgcattccactgaaacattttaatgaaaatagaaaacgtccgtgcataatttgctttttctattttagctttttgcagaacatacctttttataataaatcatattctttttagataatggatgtcgagaaaaataataaggtcagctctattaaaaatttcattcacccacgtatagtataagccttctataatccattcttttgaagctgcaatatgatgtaaacacttttttctatccgtttcacttcttcttttatctccttcatatgttcgttcccacataatgttattaagttcgtagtgaggaacttttaattcatgggataataaacgggcaagagttgtttttccacttccaacagctccaacgatatgtatttttttacatgaagcgctttgaatacctcatctcctcctacttcaaacctgtttttttacacatattgtataattcacgttctttttctctaatgcaaactagaacattttatgctagtattttatggtacttgactgaaaaaaggagtgaaatcgcagtgcctaaaaccctttttggaaaacttacgctgttttggattggactatttttattgattacaggtctatttttttattataaatatacaaaccaagcgtttaccgctgcagatttattctttcgcgcctctcctcctttagctgctattggcttccttttaagcgcagccggactatatgaagaacgaggaaaaaacaagctaattcctctcgttgtactcagcattagttttgtcatgctttgccaagcaggctatcattttatacatatgcatactcccccgccgcgtccctgactttgtctcattctcatttataaaaaagctcttcgtttagtatattaaacgaagagctttactctctattcaaataaacgcacaagcttttttgtgtagggatgcctgtttttatcaaatagatttgcacggtcaaattgatcgataacctcgccttgctgcataaccatcatgcgactgctcataaatttcactgccgctaaatcatgcgaaataaacaaataagatagctgaaacgtctcctgcaaatcttttaataaatttaaaatttttgcctgtactgtaacgtcaagactcgctgttggttcgtctaatagcaccagagacggacctacgctaatggcacgcgcaatcgctacacgctgaagctgtccaccgctgagttcatgaggataattcaacgcatattctgcgctaatcccgactgtttctaacaaataaaaagcgagttctttttcgtttctgctcacatgagataaaaatgaaggaacggttcgctgctgccgtaaaggctcgagcaaagaatcgatgatttttacttttggattaaaagaagccgcggggttttgaaatacgacttgcatgcctagacgagcttgctgcagtttttttccttttaaccggtgaagaggtttctctgcaaaccatacttctccctgctgaatctctgttaaccttagcacactttttacaagcgtactttttccgcttccactttctccaacaatccctacacattctcctttatcgatatgcaaggaaacattatttagtgctttaacgtctttatactgtttcaccagctgcgtgacgtgtaatatacttttttctttcatatctcactcctatatcaacacttttttctgcatatctaacaatcgatcaggcgttttctgtaaagaaggaatggcgttaaacagtttttttgtataaaagtgatgcggagcgtgaaacagagattcgatactgttttcttccacgatctctcctgctaacataatggctgctcggtctgcatatttccgcacatgacgcaaatcatgggtaataaacaaaatggcacagcctgttgcttctttcagcttatgcagcagctgaagaacttcagctgctaacacgctatctaaagccgtggttggttcatctgcaataatcaaggcaggcttcatcaccagtgctaaagcaatcgctgctcgctgaagctgtcctccgctcagctgagaaggctgaagctgtcctccgctcagctgagaagcatagcttttatacacgcgttcattaggtaaattcacagcttttagagcctgaaaaatggcagcagtcctgtcttttttagcaagcttactatgtgtacgaatcgtttcatcaaactgctttccaattgttaaaaaaggagtaaaggcgcttcgataatcttgaaagatatacgaaatatcttttccaaggataggcgcatatccttcctgcttaaatataatagatcctcctttaagcgttacacctgaaggcagcagtcctcctatcgaagcagcagtgatacttttaccgcttccgctttctccaacgagcgccatccactgtccttgctcgattgtaaaagaaacgtcttttacgatttgttttgttttattatgaatggctagatgctttatttctaaaacgatgacgatcacctcttttactgattaacttgatatttccctcgaatatattcacctaaagctgtaaacgccagcacaaataaaataatggccacgcctggtatcaacattaactgcggagcattgtaaaagtaggccctgccttcatttagcatcgttccccattccggagtaggcggctgagtccctagtccaatataggataatgaagccatcattaaaataattttccctatatccagcgtagcaagaacaagaatatgtcctcccacatgaggaagaaagtggcgcaggattaaaggtagtgttcccactccgtttaatttagcgaccagcacatattcttttgacttttcttgaagcacaatactgcgcactacccttgcataaccaacccactttacaataaccatcgcagcaattaagttaaataatccaggccctaacagtccgcttaagacgatggctgcaatatagtcaggaaaagctaaaaaagcgtctacaattctcattaaaaagcggtctattttccctccaatatacgctgaaactaagccaacaggtactccaatcaaaagagaaagagctaagacaagaaagctagttccaattgtggtctgagctccagccacgattcgtgaaaagagatctctgcctaagtgatcagttcctaaccagtgatcaccggtggatttttgaagccgatcttgcatattaacttgtgtgggatccatcggtgttagctgacttccaaacagacaaaataaaataagcgcaataccacacacgcttatcactacaaaaggaagctgcggctttttcacgttttatcccctccctttacatagagctggggatttacatatttgtagctcaaatccacaaatgaattaattaaaacaacaaacaggcccatccacaaaatatacccttgaatcacaggataatcacgattcataatcgcatcaatgactaattttccaatgccaggataagcaaaaagcacttcaatgatgaccgttcctccaagcaaactgcctaagctcgtgcctaaaatggtaaggatgggcgttaagctataccggaacgcgtggaaaataaaaatgcggctttcactgattcctcttgctcgagcggatcgtacaaaatcttgtttcagtccttctagcagactagctctaatcattcgcatatacacagcggacatggcaaaaccgagtgttaaagaaggcagtacaagatgagccgctgtgcctgtccccatcgaaggaagccattgaagacgtacagagaacagctgtataaacaaaaggccgagccaaaagcttggaatagacgctccaattaaggaaatacttctgctgagataatcaatccatttattcgagtatagtgctgacagcgtgccgagtggcacagctattaacagcatcacaaccaaagatgcagccgtcaagcgcagcgtagccggaaacttctcggctaattcatcgatgacaggctcttttgtcatatacgaagaccctaaatcaaactgaaaaaagcgcttcagccactttacatattgaatatatacaggctcattaaaccctagctctgttcgcaaactatttatttgttcctcagaaactgccacgtcatctacacggagcatttgcttaactgggtctcctggagccagcttcatcaaaacaaagctgagaaacgataggataactaaaaaaatgagtaattctattattcttttaccaattaatttcatatctatttcacatctaaatcctttgttatcacatagtattcacttttagttgtgacccaatttttcacattgtctctataggccacaaaattattcggatgaacaatcgaagagtggagcgtttctttttctactatttctccggcttgccttgctaactcattgcgctgtttttgatcaactgttttattgagtttattgataatggaagttaatgctggttcatgaaaatgacctacattaaatgctcctccctccatgtaaagagcattaaagaaatatcctgcatctcctcgcggcgcggttactagactatatgtaacgattccccaatcattttttgttgtcatatactcgtccatattttccacttgttgaatgtctatttttacaccaatcttttttgcttctgactgaagcatttgtgacattaaaggcagttctggacgataagggtatgtaacaagcttaaaggaaagctgttttccattttttattgcttttccatccttgagtatataaccggctttttctaaatatgtttgagcttcacttggtccatagattttcgttttttgatcgttcgaaaaatctaaactctttaaaaatggaccatttgctggggatccttgacctgcaagcgctgtatcgacaacatcttttggatttaataatacatcaaacgcttttctcacatttttatctttaaacgcttcttgccttgaattataaaaaagcatttgatttctcaggctcggctgtacatctactacaatagaagaatctttttttaacgtgtttaagctttcaatagccggacggtacacaatatcggcttcacctgattgcaaagcggacgttcgtgcattttcatcatcattaaatgttaacacaacttcatccaattttggttccccgccccagtattctttatatttttttactttcatttcattatccggtttaaacgaagctactttaaatggccctgttcccacgggtttactttttgtatctggaggagcatctacatcaataattgctgtgtttggatgaacaagttcagaaggcagcgtggcaagcggctctgttgttgtaatggttaagatttggccactggcttttatttctttaattttaagtgcacttttcattgcttcgctttcttttatcgttctttctaacgaatgtttcacggcttcagcatttagatccttgccattttgaaacgtaatcccgtctctaatctcaaatacccaggtcgtcccatcatcttctgttttccacttttttgaaagccacggttcagtctgtaattgctcattaacttttactaacgtttcggcaataccggctcgtacagttgtataatttaactgtggatcgagcgtgtcacttggaaaattcgatacaaaagtaagtgatttctttttgctcttttcttcggtactcgcagagttactcgaacatgccgctagcagacctatcgcagcaagcgttaagcatagcaaacttatcctttttctcatataaacccctcctttattcaaaacaatctttcttttatgtacggtttctaactataacttcctccttttaaatcgtaacgattattattatcataaaaagtttaatttgtttaccttactttgtcaacaaaggtttttaaaggatataggcgctctaacagttgttttcaccctttatgatgattaaaatttattgataacgcatacaaatgagcataaaaaaaacaaagccttctcgaggctttgtttatgcagcgtgtttttttcttttatatttccacatcatatatcgataacgaatcgtgcagcctatacaatatcccattagcgctacaccagcagcaagaatcaccattatactaaatacatagccgacaagcgtatagcccattaaaaatgaaatgaaagcaacccccatacatatcgttgcaatccattggttaaaaagctgctgatcccggtcttccatttgataagaagaagcaggctttttgagaagctttttccctgccataattacgggattacgctttgttgcaagtgtgactactccaatgagaaaaggcaaaagtaaaagccactttgccgcaagtaaagcgatcaaaaccgttataacgataaagagttgattaagctgaactaatggtttgggaatgctcatggaactcctccttcttaaaacctattatacaaattggtttactaatttaaaagaaaaagcactccaaatgaacgataagactcatataaaaaagttacataatttcactaacgtactttaagatcagtatcgtaaataaaatcaagacaacgtatcgtaaagaacgaattcgacgttgaagaagacgttttacatgccttttattacgcatatgggttctccctttcgtatattgaattgtctctagacacacttatatcatactttttcggagaacaccaacgtcagaaaaaattgccaagaaccacagctttatgcgcttaaaaagccttttccaattacatctcgtacatcgtgtacaatcacaaatgcttcatcatcaatttttttaatcagcttttgaagcttaatgagctcttgtttattaatgaccacatacaagatttcttttgattcttttgtatagttccctcgaccgtttagaatcgttactccgcgatcaagctgttcattgatttgatctgctacttcatttttgttgcttgaaataacggtaacggcctttttggcatcaaacccttcaataacaaagtcaattacttttgttgtaatataaagcatgacgatcgtaaatagtagcttttcgattccaataataaaataagaagccaataccactagtaaatcaactattaaaagtgcatgactgactttccagtttaaaaacttatttagaattcgagcaataatggctgaacctgctgttgttccaccaactcgtaaaatcatcccaattccaacgcctagcagtacaccggcaaaaaccatgccaatgagctcttcatgaagatgaagaccccaaccttcagttacgtgaagaaaaatagatgtagcgataatcgtaatcatcgtatagacgatggtttttttctctaaaaatttataccctacgataagcaagataccgtttaaaataaagttagtgctgcccgttgaaagatgcgttgtataatataaaataattgatatacccgtaacgccgccttcacctagtcctattggaatgacgaacatgttaactgcaagtgaaaatacaaacgaacctattaataaaaagatgacatcttttactgttttactcatcgattaaacctcctcgtcataaaaattcacataaaaaagtcccttctccaaaagagaagagacgcttatgtttagtttttatattacgtattcttaaattgccatgtatgactataatatgttcaaatacgtttgtcaaacggaaagtttatgcattatgtgtaaccacggctatgagtcatttatcttttatgtatactaggaatgttttaatttatttaaacaaagacggatgcaggaattagttgactcaatcaattctttatcgccttttttcaatcgaatttctaacgcacgttgaaaatagtgatgtgctctggaaacaacccgctgatcaagtaaacattttccataatgctgatagacaaagtcttcatatatgtgaaggtcttcatctgcttttaattgttcaatgagtagctgaaacgtttcattcgctttatcccactgttcttgccagtgatatgtatgtccaagtcggatcgtattcaaaaattcacctattgtatcagcatgccggtcatatagataaatggccagcagcagatgtctttcactgctcgttaattctccaagtatgcgctcatatacaccaatatgtccatatgttttagcagcggcacactcatcctcttcttcaagagctcgtttctttaaatagataattccctgcttcatttggtgtgggttaaccggaacttctcgaagctgttcattaaatcgataactcatattaaacggaagatctctgatgttcatgcacgctcctttcatgtggcacatcagcaaacatactttcatgaccgcttgcttatggtccattggatgtaggattctttccattttgatacgtttacgcgatttacaggaaagctcagcaaaagtgctgagctgttggttcttattattttacttatatatccattttatcacaaaaaatactaccgtaaagatgctcaggcagtcttcatataaaaaaatggttttttatcaataaaaatggttttatgctcttgaaagcctatacgctgatacaatttcttggcttctacgttattatattcaacgtttaacgataaaaacatcttacgctttttggcttcttgcttggctacatttaaaagagccgttcctatcccttttccacgataagcttcatctacacatagagagtcaatataataatctccatgttcagtttctatatcaatttcccatgctggattattaagtttagcacgtacaaaacgcttaactggttcataaagcgtttgtaacatacttccttcgtagcaaagcataagtccaactaccttctcctcgacttctgcgattgtaatatgatgatagctatagcgattcttctcagacagaataaacgctttaagtcttaaaagcgcttcttcattcgttgtagccgccgtatgagagcgtgcaatactgccaagcatgtcataaagtaattccgttacagcagaagcatcttcttttcttgctttccttattttcacgattttcaaactccctttattctcttcgcttgcgttatttgtagcaaaccttcttacctatctactttaacacgaaaaagaaaagaaagaaaaaattaactgctaatcttcctttcattgtataattaatgtatattttcaaatgaatggatgatgactatgaaaaaacaccgtcagcagaaagatactacggtaagtggatgggaagttttagcagaaattcttttacaagtgcctcagctgctcatatggcccctgcgtcttcttatacggattggtcgctctttgttggatggtatttagccactcctatacaaatacttacttaactcaaaaaaaagaaattcagcagttactgaatttctttattagttttttgcttttttgtatcctgcttcttgcgcatctttttcggtacaaaaccaaatgacgtggttcatggtttgattgtagtgcgccccagttggcacgtgataaattttagagttctgatttccttttattttaccttcacagcttttggcagactgagtatccttttgtttagaagaggactgattttttacagcatccgtattataccctttttcctgggcatagttttcaatgctccagattcctttttcgctttttcgagcctgctcctggattttcttaaattcatctacgtactttgtgttaggaggaaatactgctacgcgggctagcccttttgctagcagctcttcattatacagctcattgtctatccatacatacgcaagtaaccggccatattgatcacgctcttgcacatcaaattcaagggtgatttcctgtccttctagccttttttttgtgtaagcagatgcttctggaccaaagggctgtacgcctagtttgggatgctttgtttctggggtatcaacaagaagtaatcgcacgcgatctctctttccgttcagcattttcactttaagcgtatcaccgtccactactctttctaccgtagccgcctcacctactacatcttcacgatttgctttagaaggactatgatcttcttcttgatctgatgaatcttctacttgaactgcttgttttgtatcggcagaagatgtgcttgaatgacttgcctgctcatcgctgcatccagtaagaagcagcataaacatcgcaagcatcgtgcaaataattgcttttatttctttcaaaacccgggccctcctttaacacgttccctatctactatataaaagtaaaatgattttataaatagtgtagatcacctaaaaacaaaaactcgtgaaaatacctttcacgagttttttcgtgcgactgttataaaaattggttacctgttttaaagttattcttttaaatagcatctattttatttttatttcacgaacacatttttcgttttagtgtatccagatttttaatcatgaggatattttacactacaaatacatttatcgtctaccgccttataagaataaggaatagccgcacaaatagaataagtgtgaatatttcaatataataactggctaacacgattgctatttttttgtaacataaataagagccctcattaacaatagctaatagggctcttcaaacctttgtttttacgatcgaattttttgtttgcgcatccactgggtagcgacccacttttctccttttataacaggagctcccccgtggagagtacggtcattaagttcagcgtcactataaaaatattcaaagtacacggccattccttttgtcggagatacggaaagacccagcttaggaaaataagtttctcctccttcttcgacatcgtttaagtacataaccaatgtactaatacggttgtttttagatgctttacttgcagaagtgaaataatcgtgatgtgctttgtattcttggtcaggcaagtattttaaaacttgaagaccttcagcatattcaatagatggtcccatgattttagaaagtcgtctttcgatttgatgtacaagctcgttttcgctttcttcaaaaaacatgccgctgctcgttcgaatactgtttacttcacgtgcagcaccaatttttgatcgctgcattttatctttggatagctgtataagttcgtcacattcttcgttacttaggacatttcctaaaactagaacaagaggctcttcaaatcgagcaacaatatcaatctctctgtcttctaatttaattttattccctgtatggttaaaaatcgtttgttctttcgttagtaaagatgtattagttagaatcatcttttatcggctcctcgaaatagctattttccaattcttcacttcattacatgtaaacgcttactaataagaattatatcatgaatacgaagtaaattctgctagtaaaggaaataaataaaaagaagcccgttatataacgaacctccctcattttttcttttagatttcacatgtcgtttaaatgctttaactatctaaaagactcttttaatatagagtatacgtatcaaaggctgcctaaaatcagcgatacacaagttcttttttacttaaatcaagcgtttgtgatgtagaagcatgaatttcgttaaaaagcgctggattttctaccagtgacaagccgtaagaaggaatcatttcttttatttttgattcccatttcttcatatgctgcgggaaacacttttccagcacttcaagcatgacatgaacggcagtcgaagcacctggcgaagcaccgagcaatgcagcaacggaaccatcagctgaactcacaacttcggtaccgaattgaagagttcctttacctccggcttccgtatctttgattacttgtacacgctgacccgctacgacgatatcccagtcttcgctttttgcgtttggaataaactcgcgaagttcttccatacgcttttcatcggacaacagcacctgctgaatcaagtatttcgttaagcccatctctttgacgcctgctgctaacatcgttaagatattattcggttttacagaattgattaaatccaaatttgaacccgtttttaagaactttggtgaaaagccggcaaaaggtccaaacagcagtgtttttttgcggtcgatatagcgtgtatcaaggtgcggaaccgacatcggcggagcgccaacctttgcttttccgtacactttcccgtgatgctgcgctacaacttcggggttattgcataccataaataatccgcttaccggaaaccctccaatatgtttggactcaggaatacccgttttttggagtaaagacagacttccgcctcctcctccgataaaaacaaagttcgccgtgtgatattcctgtttgccggtatgaatatcatgtacttttacttcccacgagccgtccgcggtacgtgtcagattttcaacgctgtggttatagtttatttctacccttttactttttaaatgtgtaaacaacatacgagttaaagctccaaagttcacgtctgtccctgagtcgattttggttgccgcaattgcttcagtcgatgtacggcctttcataacaagcggcatccattcttttagcttttcaggacgatctgaatattccatcccttgaaacaatggattatttgataacgcttcaaaacgttttttcaaaaaggatacgttcttttctccttgtacgaaactcatatgagggattggcataataaactcttgcggatgatgaattaaattactgcttacaagatatgaccaaaactgtcttgaaagctgaaactgttcattaatccgcactgctttcgtaatatctatagatccgtcagcttgttcagatgtatagttcaactcgcacagtgcagcatggccagtccctgcgttattccattcattcgagctttcttctcctgcatctgcgagtttctcaaatactttgatttcccattccggcgctaactcttttagtaaagatcccaacgttgcgctcatcactccggccccaattaagataacgtctgtttttttatatacattgctcatcacaatcttccttatcttttatattttaaaaaagcaccttttagcaacatgcctgttctacctgactctctacagattaagtatgtctgacaagttatctgtcttacataatgggtgtttttatacataccctttcatcttgtccttttttaacatgctcaatatcacttcagcggtttcttcaactgctttacctgagacattaacaataggacagccaatgcgcttcataattttctcagcatagtccagctcttcaaggattcgatctacattggcataattggcttgagacgctaaacctaaattttttaatcgttcttttcggatttcattgagcttatccggtgtaataactaaaccaatacatttatttttcggaatagtaaaaagttcatcaggaggcgtcacttctggaactaacggtatattcgctactttaagacttttatgagctaaatacatagaaagtggcgtcttagatgttctcgaaacaccaatcaacactagatcagctcgcttgatgcctctgaagtcttgtccatcatcatatttaacagcaaattcaactgcttctactcttcggaaatagttatcgtctaattttctcgttaatctcggttggagattaggttctttattaaaggtttggctaaaggcactcatgagtggggtcattaaatcaatggctacaattccttcttcttgtgccttttggtcaagatactgttttaaaggtgggatgacgatagtatacgcaatgatggcctcgttacaccttgcttcagcaatgatattatcaatatttccctcatcttctacgtaagaagtattttgaatttcaatatcttctccactaaattgagttaaaactgcttttaccatcagctcagccgtttcacctactgagtcggaaactatatagacaatttttcttttattcacattaaatcttcctattctttgattttaatagtttaataacgctagtattttttgttcaactatcatttatcagcttgcaagatacatattttatgggtaatgaatgggctaatatcctggatactgtgattataaacacttaaaaaacgagcgaatctaggatttatgtcatactaattataaaataaaactaaatatgttatactattttcattaaatgttatattagcattaaatatacggagatacaatcccttttctccgcattttataaaaagtttgaagaaagaaaaagtttagatgttaaaatgttttatgctttggcatggtggcactcatcagggctgagaggcgttttgcagcgataggtacgaggatagttatatagttatgttgtttatagcatgatttttaagttatagaagatttattcttatctattctttttagctaagagtgctataactaaaaataatgaacggtttactttccaccttatgtatactaaaaacaccgcctaaaagacgatgttttgaatagttggttataatgcattgtcatgaaatagattaatttttataaaacgggattacttctagtagatttttgcaataaaaatttagaaagataatgagatacgccgttttcgtcacagttaaattccgttacgtcatcgacaatttcttgaatatgatccggcgcatttttcatcgctacggcatagctggcaaactgaaacattggtaaatcattattgctgtcgccaattgctagaatgtcttgctcgggcaaattaaaatgttttagcatttgctgaattcccgttgctttatttacgtttgccaccatcacttcaacattgtgtttagatgaagtagaagttgtaaagtcgatttcttttttaagttcttcaagttcctctttccatttatcgatatgctcgtgcgttcttgcaaagaaatagaactttgaaaattcacttccctctacagaatctttccagtcaatttcttctttaatcgcttgtttacgagaaagccattcgttaatttccacactgtctggctttggctctctaatttcattttccacataggactgatcttgttttagcgtcacgcgaggtgtgccatacgggaaaagctcgtagtataccttgttcgctcttgctttttcaataatagtttccaccaattgaagcgaaagcgagtgctgaaagactgactcttttcctacgtaccctgccataccatttgacgtgataaatccatccacttgaaagccttcaggaactaactcttctatttcatcaaacgctcttcccgtagcaataaaaacaaaaattccctgttttcgtaattcgtcaatgatttcttttgtttgaatacttactttgttggagcgatttaatatcgtgccgtccatatctaaaaaaattgctttaggttttaacaacatatttattccccctatttgtaaaaagagtgtacttggcaagtataaacttttccattttcaaactcaatgaatgtactttgcttttctcttttataaaactactataatactctccttacatctaaaattgtacaagcgctataaagaaagaattttatctttgcaataagcctttatatactaatagccggctaggctaatttgatataaaactgcattcacaaaaacgaatttttcttttagcctttagagtatcgttcaaaaaagatataataagactgttacagattaaatacatacagaggaggtcaacatgaacgaaccatccaatttttctccttaccttattaaacaaatcagcgatgcgatcgatgacaatatcaaagcaaagtgcatagactttttatatgattctcattcgtttttttcgaatgaaaaagattttatagaagactacattttaaatatattgcaagatacgtttgttttagagaataaattaataaatcctaaggaaataagaaatcccgcttacaaaagaaggcaatcgaataagaaaaactggctgcaaacgttaaaaaaagatattaaagcagaaaagcctaatcctatttttgaagacattgaattggccaaaaaagtgatggataaaaaagtggataccgaacacttaaaaaagctgtttggcgtggaaaaacctgaagatattttaaagataaagttaaaagaagtagaggcatgggctaaaagtaaaaaaacaaacattactgattttccttatttagattcaaaaatgaattatcaaatagagaaagcatttcacacggactttacttttttaattgctgaaatcatactagaaaaatacaatgggaatttgagtaactggattgataaacgattaaattcgtgggtagaggcccctatcttctcaaatgaaagtcactctcttaaaaccaatatggaagttaaaacaaactcccaagaagtcgttttatataatgactataaagttgatgaagaatatttcattcgcaccattatccctgtgaatgataatcaaacggttctttccaaacgaaatatggtattagatccaaaagattctcaaattatccagtttgctctttcacagcgcgacgagatgttttataaagaaaaaacggtgactcttgatttagcggatatcgttaaagaaatttataattcaaaaggtgtaaaaaactatgaagcggttgaagcccgcattatgaaaattgccagataccatgtagaaggtgtagcgaagaagaaaaattccagagatacaaaatttgcaataaacttcttccaaaaagctgttattgaaaccgatgaagtaacgggcagacgatatgcaaccatcgtatttagcgacgatacgcatcaaggctttttaaatcagcagtttgtacaaatttatagtgacgttattaaaaagtttaaagataactcgctgtcttctttactgctgtatgcatttcaaaaagagcgattagattgttatttacaagagaagtcttacacccatttttacccgtatcaatattttgcttcaaaagttcgttttcgttcaaagaaaattgatgtcaatctaaaattaattaatgaatctctagcagagtttgttagcaatcaagtactgatccaaagttatcagcaaaaacttcaaggatttgaaatctcttttattcctcttcaaaattatgaaattcaagactattttggaggagaacatagagaaacattggaagggtaaattgttcccttccttttttatttgatatttttccactttcagcttataaatacaaaatatccctctatttttatttcatagtttggaagttttgtcatttttaacgtactaaccagaagcttttgctgtttttgacgtacctgttcgcttcttttgccgtttttagcgtactaattactaccttttgctgtttttgacgtaccactctgattcttttgccatttttgacgtactacattcattttatttactcgtaatcacttattaattgttaattattctctttttttcgtaaaacaatcctaccttttgccgtttttgacgtactccttcactacttttgccgttttctgcgtactaaacattgcttttccctttgttattgccttttcaaaccccattttttatttttttcgcagcatatataaagcttttgccatttttgacgtaccaaacaaaaacttttgctgtttttatcgtactactacgtcgtttttgacgcttttcacgtactaaaaatagcttttgccatttttgacgtactgatgaaattcattgtgttatttacaacgatcagagaagtgatttttttacctttttttaggtgaatcgagataacttttgctgtttttagcgtactactcttcacttttgctatttttggcgtactatactgagccttttgccgttttttacgtactaaaacgcataaagttttttttgatttttactgatcgtaacaaatactgttctgccggcgcttgcttgcttttgccgtttttggcgtactaaaaaacctatacgcttcaccccttgatatgacagcattctttgaaccttttgccgtttttagcgtactactcgttcgtttgcgattctatttcttattgatataattttcacaaggtattctttgttattttaccctaataaattattgttgatatgaaatagattggagggattctcatgataaaaaaagaatttgcgaaaattggaaaacaaattattcgccaattgtctagcaccgtagaaaaatataaagatattgaagatcacatggacctagacgctcatgggaaccctacaatcaaaacagtggcagaacatcaccgtttatctaaatctcaaatttcacaattaattttttatcacttccttcacgttgatgaaagaggtattatttgtgatgtttctgaaaaagagattgcagccgctttgaactgtaccgttcgaacagttcgcaacaacaatgtagtattagcagaaacagaattaatttcctattctcgcagcggcaaaggaatcaatatttgtattgttccctatcctcaatattttgaagaacacggctttgggtttatggaattagaatatactcgctttgaagaacttattctaattgaaaatgtaaatgcccttcgcttagagctgcgcaaagaattggtttatgacaacgatacgattaagcgtcagtttaatcctgcagaaaacacttcaaaaattagctttaatgattataaaatttttacgccgaaatatactcactacaaaggtatgatgcaaaaaatagctgaaacacagacaagcgcatttaaaacagttgtccaaggatctactattttctttgttttaaaagacggagctaaaaatggcaagatgtcaaaacaagaaaagaaagatcaatacgctgcggcgattcgacgtactattgaagagacttttgtaaaattatctggacacagcacagattctaccggaattattatgtcttcattccaaaacgaagacatcgctgatttggttcagctttcttttgaatatggtattgaacgagtaaagtctgccctttattctctgattgaacaggccttcttcagccatgatgctcaagtcgttgaaaattacggtggaaaaatccgtacgctcattcgaaaagagctttcaaaaaatcttcaagatcaagtccctgccgaacttacagcttcataaggggcttctttggcatgccttttttttattttctctcccttctcttctcttattgatacaaatagtgcaaacaaacacccctttttgcagctatccaattccattatcctatctatataaacgtaatgagttcaaataaatgatatttcttgtgtataactacggaatattgctaaaaaaataccttcatacttatccacaaaagaaagaaaacatattcaatgactgttatatcatcctttttgttgataaaaacatcccttttatttttttattaacgataatttccaggttatttactctttaacacgactatttttatccacagtggaaataattcatacttttaatagcaattttcatactatgagttttaaaatccgtctattgcagaagaaaaaacatagtgaataaaatagtttccatatctgttgttataaaaaacatcctttagctaaaggatgctgttcacaaaaaatgtctattttccacacagttatttattgaaaagcaatttcctctctaacccttgatatcattgggttttcacagggtttttctttctttaatatctgtatataatgtttgttaataagatctatactaatctctgttataaggttttatttaatatttgtataaagaaatgttttaaagatatctatacctgaggattttttctttttctaaattaaggagttttcattacgtatacctaatacaaataaattaaaataaaacaataattcaaacgcctcttcataaattctagtagtatatttttaaaaataaattatactattcagtagagaaaattttataaagcaagaaagggacttagtcatgaaagacatacagtgggtacagaaaactttatttaataccggtaagtggattgacattagtgaagtaattataaagattatcttgattttcattattgctcaaatcgttatcaggtttgctcgcagtgtaattaataaaatctttgatttcagatttaaaactaaactgctgaggtacaatgaacgtaaagaaataacgctgaaaaagctttgtctgagcattgtcatgtacgtagtgtattttattgtacttattacgtctttagaggcaatcggaattaatatgaaagcactcttagctggtattagcgtagcaggatttattacaggcttaggtgcacaaaatttgattaaagatattttaaacggtttttttattctatttgaagatcaattctcagtaggagatcacgtatccataaatgatacgaaaggaactgttgaagaaattggattgcgtacgacaaaaattcgcggagtggatggagagttttacttttttgctaatagtaacattacaaaagtagcgaactatacgctcggtgaaattcccgaagtacataagcctgaacaaataaaaactcgtgaagaatagcttcacgagtttttatttacgacagttgtaaaaaattgatcgtatgatgtaaggtgataatctgcttcaatgtcgtcattttgaaatgcacatgttttgattcccagttcacgggcaggttttaaatcaagctcgcggtctccaatcactaaatcgagctgatacttatcgtgaagataggcataagcgccgctatcaggctttcgtttatagccatcatcttttgtaataatctccgtaaaatagtgctccatattaaaaaatgccaggatatcaagagtagactgtctagatttatgtgtaacaattacatttgtatccgcaaagctcagtacgtcttctacatgaggaaaagcaggcttatctttaggattgattttctgttcgagcacatggaagtgtttatcaaacaaagattttttaatatcgaagtgcttaattgctatgtcagaagatatcttcatttgttttaaaatatcgtcttctgaaatcgtttgatctgttagtaattctttgaatgcttttacaatcgttggataggtatcaaagatggttccatcaaagtcccataaaatattcattttcactgtctctccttttttaaaaacgtaacgattataccaaatttttcattgcttgtcagtgaaccattttgtcgtcgttgcatttaaagtaaaaaaactcgttttatacgagtttttttactttattagctgctgctgcacccactcccacagctggagcttgaacagctgctgccgctgtcatgatggtgatgccctccatcgtgttggtgatggtggcgattgtcttcccatggacttgaacagctatagccgctgtaagaggctgtatctcccgcatacatcgtttttttatatagcagcagctcattcatatggcttgaaaagttggcggctttgtagagagaataaaaaacaaaaccttgaagaagaagttcgtttgatacatttccttttttagccgtttttttaaaataagttgatccgcctgctttttttctttttcgagcagcattgatttcttcttttaacgtttgaatcagggctctctgcagtttttcccatttgccgtttcttaaaaaatagcgatctagtaattcatcttctgacaatctttgaaaatcttgaagtgtacttttatcaagcggatgctgaaaaaatttcccccaaagcagtcggctgttgcccgttatgtcaaacaaatgagcatacatccaatcgaagaatgctcgcttatccggctgtggtgatggcgtagtgtctacatttggctggtgatgcaaaaaacggtcaaaaaaacggtctgtaaaacgcccgtaatccactgtaaacatgatcatttcgtgccacacttcatctacttttgcactaaacatcggtacgtctttgatgactgcatttaataaaaagtagcgcttcatctcaaaaaacgtccattctacttcatcgtcttttgtatttcgcccttgcatacgctgtttcacctgttgaacataggctttcggtaaagaatcttctagtgaatgaacaatatcttcaaaaccattaccttcatgtattccgagctcatctggaagctcctctttatacaagcgaaatccccttggctttccaatccctttaataatcaaagctaaaagaattaccgctcctactataattgctgttatcatctttttccccctatacggtgtctatatattcaatattttaccacattcgtaaaatacaaaaaaagagctcaattaacttgagctctcgtcatcatcgggcatctcgtctaccttttctactttgactagacctttggtgctatattcaagatcaaagtatgctttaacgatatccccttttttcaaattgcttggaatcggttcatttaaatttttatcggaaaatttaatgcccgttccttcttttgttgttccgctgtatgtaccattttcgattttttcaatagtaatataatacactcgatatttgtgcgcttcctcgtcgccctttgctttttctttaacggtttcttgttcagggagcttactcagtgtttcttgggcctgttcggaagtcggctctgctgatcgatttatgaattgcatcacaactaacactaaacatataactactaaaactaataataatatcttttttgctgataaagacaatgaactgtgcctccttacacctttatgtatatcatgctgcacacaagagattatacacgataaaggattagaaattggaataaattctataaaaatagtaaaaatatgaaaaagtacctagaattttttacgcttttctgcacttttttgagataaaaaagaaatttggtaccttatccttaaattgtaactgattcacttcattttcgaaaagagttttgaccattttgtcgtaaaaaagtcataataagaaggaatatcacaccatattgtcgaacgtatgtatatacttataatgaactgccgaactgcttttctctaccctcattgttgaggcaatatggcaactgaaacagcttgctgttaaattcagattacacatctatactcaggaggtggaatgcaaaatgatgtttgcacttattgttgtggttggtatcgtagcacttggcgtagctagcttctacgtcattaagcggcctcaaggcgctgttgatcctgaggatcgcaaaccgcttgtttctgtaaacgggcatgttaaatttgcagaaggaattaatcaaatttccatatctaaaattgacatgtacgatcagcgtcttgttatcaatcaagtagctattattccatttaaccgtattcaacgagcagaattttcaaaggttgtcaaaaatgaaaaaggccttcacggagctcctgttcaacgctatttcggtgaattaaccattcatttcacagataagaacgggcaagaaacatacattagctgtgaaacaccgaaaaaaaatcaatttcacctcatctaccagtacgatttaatgaaaagacaattaaataagcgtctgggtcttgaagatctgcagccttaccttactcttcaagaaccatacgaactataagagaaaacctccctttttcacatattatttcacttccctgtacatactagaagcgaaactgaaaatgggaggtcattccaatggatttcgtccgttttttgcaatatttttgttcaatcgccggcgctctatgcttagggtttacctactatcacatgttcaagcgtgacgctccggttaaaaaagaagaatcacagcaaggtggaactgactaacgttcaccttgtttttttatgtgcaggcatgtgtacttcgcattttgtggttgaaagttagattactttaatcatttgtaaaatcacgggtgatttttctaaaggaatatcctctgtgttaatgataagaagtcctttttggacgctgtaattggaggaaggctgtaacacaccgtttatgaatagattactgtacgagtagctctcaggatccaatatatgctgagtgccgtattcttttaatgcatcttgatctgtaaagatgcgcttgctgcctccggctaccgtatagtattcaaagatgcgaacttttttcggaaatatatacctgaattcctgctgaggcaacacgggaagcttaataaaaggtgttgaacaagaggttgcatagtgattgcagccgtaagattttttcttcaagaaaaaatctccttcacagatgtacttagttatagtctttaagaattaaatttatgcctcttcaaattatgaaactcgctatagccgctactgcacttccagctttagctacggataacagctattacaatgtatatatcaacggcgttttacaaatggctggcctttctatatatacgccaggagctacgggtgtcggttctttagctattactgttcctgcaggatccagcgttttaacaggttctcctatagttttagaagttgttaactttgctcctgattctacaactgatgtacaaacttaaaaataacttgttatcgttttattttaaagcgtaatcgcgtgtaagatatatgaagtttcagttttacagaaatttagtggtcataataaaagcttctgcggatgtagcgcagaagcttttattattgttatttatttaattcaaaacgcccagttcccttttctaaacacaggctcgcttgtgccgtcagctttgatgccgtcgatgtccatttcagctgagccaatcatgaagtcaacgtgggtgatgctgtcgtttgctccgttttgtgacagctcttctttagacatcgtttttccgccttctagacagaaagagtacgagctgccgatcgctaagtggttggatgcattttcgtcaaacagcgtgttgtagaagatgatgtttgactgagaaattggcgattgatgcggtactaaggctacttctcctaagtatttggcaccttcatctgtttcaattaggtgctttaacgtttcttcgccctcttctgcttttacatcaacaatttttccattttcaaatgttaacgtgaagttttcaattaagtttcctgcgtagctaagcggttttgtgcttgttacttgtccgtttacgccgtctttttttggaagtgtgaatacttcttctgttggcatattggccataaacgagttgccgtcttcattaacactgcctgcgccaacccaaatatgtttgtcaggaagctcaattgttaaatctgttcctggcgctttatagtgaagcttagcaaatctcttttcatttaaaatgtctacttttgtatgtaatgaagcattatgctcttcccatgcagccactggatcttcttggtctacgcgcacggatttaaaaatagcttcccacagtttttcttgctgctgttcttctggaacgtcaggaaatacttttgctgcccagtcttttgaaggaacagctacaatggaccagctgattttatcggattggatcgcttcacggaattttttcattgcttttccgcttactttttggaaagcagcaatacgtttgccatctactccttttagtaagtcagggccgcttgaaatcacagataaaacagcgcctccgtttttcacaagctcttctcttgcttgagctttccaagcaggaaattcactaaatacagattcatccgctttttcatatttcaaacgaactaaatgatcgtcatgccagtctacatcaacagactttgctccggcttcgtatgcttttttcgcaatttcacgaacaaaatcagcggaagaaatatcggcattaatgtttaatatttgccctttttgaatgtttacaccgacttttacagctagctcggcatacttttcaatattgcgctcaaactgttccataatttatctcctttacgtatatattctaacgactttattgtatcatgaataaaacatcaattaaaaatcctagcctatagtttacataatataattacgttattttacagattattatatagcaaaagtttgttctctaagaatcagaacaaacttttgtctttcacagattcagttttgtagccgagccgctccgaaatgttcttgcctatatcaaccatgcgttcttgaaaatacgttaatcgctcatttgtcatacgcatggtagcaccggaaatgctgactgcggcaacgacttgaccaaggtgatcaaaaataggcgctgcgatgcaggtaattccatattcattttcttctaaatccagcgcatatcctttttgttttacttctgaaagttctcgaagaaagctttcttcatctgtaatggtgtgatcggtatgagcgggtaagccttttctttcaagaatgcttgttaccgtgttaagcggtaaaaaagctaggatagctttaccgacagacgtgcagtgcataggggctcttttccccacttttgaatgcatgcgcagcgtctgattgccttctaatttttcaatatacactacttcaccttgatcgtagacaacaagatgaataacttcatttgtttcactttcaagttcttgcaaaaacggctttgcttccgttcgtaaatcaatagaatctaaaagctttgaacttacttctaaaaacttatacccaagcttgtaccgcccggtttcttgatcttgttcaatatagccgtactgagcaagagtagttagaatacggtatacggagcttttgttgatgtccatttgctttgcaatttctgtgacgcctaccccttctctttccatactgacaattgtgacgatatccaacgcccggcttacagacttcaccatattttctctctccatttttttctctcctttatgtgtcgtgttactgccgggcattttttatcactcttatacgtttacacgttctttctctgcagcaaacggattttggagggttccaatttctcggatggtgcattcaatgatatcgtttgcgcttaccagctccgcgccgaccggacttcctgttaaaaccacatctcccggcttaagggtcataacagtagaaaggtaagcgatcatttgctcaacggaaataatcattaaatctgtcgagctattttgtttttcaacgccatttaaaaacgcttttacatgaatggatttaaaatcaagctccgtttcgattacggggccaagaggggtaaatgaatcaaaggattttccaatggtccagtgcccgtcttcatgaaaataatccggagccgttacatcgtttccaattgtatacccaaatatatagtccagcacgtcttcttttgcgatgttcttcgcttcttttccaataacaaccgcaagctcggattcaaacttgacgtgcttaatcgcggttggaatgacaatggcatcgtttggaccgatcacagaggatgtgggcttaaaaaagaagacaggaatagaaggcatttctcttggcagctccgactttgcagccgcataatttgcgcctattccaataatttgattcggctctaaaggagccaaaagccttacttcactcggtgaaaaagtctgccctgtatagtcccatttctcaaatatatttcctttaatgacgctgatcgtattctcttttagtacacctgtatgacggctatcttgtacagcgaaccttacaaatttcataacatagctccttttcccatttgcttaattttaataagaatagtagatagtcagattctgaaggtgtaagtacagcctgccatccctatgctgacaggccgtttgttttactgttttatagctgcttttgcctttgcttctatacggctgcggtgtaaaatgggctccgtatagccgtttggctgatcgtagccttgaaatactaaatcgcaggctgcttgaaaagcaatggatgcgctgtagttcggtgccattggctgatacagaggatcattttcattttgttgatccactacttttgccattcgcttgagcgtctccgttacttgttcctttgtacaaattccatgatgaagccagttagctacgtgctgactagaaatacgaagcgttgcccggtcttccattagccctacattattaatatccggtacttttgaacaccctactccttggtcgacccaccttactacataaccaagtattccttgagcgttgttgtcgagctcctgctgaatttcatctttgctccaatttggtttttctgccacaggaatttgcaaaatgtcatcttgtaaatcagtagactgagtaagcaattcgttttgaacatctcttacatcaatttgatgatagtgaagagcatgaagcgttgctgcggttggtgaaggcacccatgccgtattcgctcctgcttttaaatgtcctactttttgtttaagcatttccgccatcatatccggcattgcccacattccttttccgatttgagcgcgcccttggaatccgcttgctaatcctacatttacattagactgctcgtagccttgaagccatttagacgttttcatatcatttttacgaataacagcgcccgcttccattgaggtatgaatttcgtcacccgttcgatccaagaatccagtattaataaaagccactcgttcttttacttctttgatacacgcttttaaattaagcgtcgtgcggcgctcttcgtccattacgccaattttaattgtatgacgctcaagccctagcatatcttcaattgaattaaatagcgtattggcaaaagctacttctttggagccgtgcattttcggtttaacgatatagatagagctctttttagaattttgatacgtaccgtttttaagcaaggtgtgtttggcaattaaactagtaatcacgctgtctaaaataccttcatagatttcgttgccatttcgatctaaaacagcgctgtttgtcattaaatgtccaacgtttcgaacaaacataagcgaacggccagacagtgaaatctttttcttgtccggagaaatataggtacggtctggatttaaacgccttgtcatgttttgacttccttttttaaaagtagacgtcaaatcacctttcattaatcccagccagttgcggtaaacatctactttatcttctgcgtctactgccgctactgaatcttcacagtccataatcgtcgtaagagctgcttccattaaaatatcttttacacccgcatcgtctgttttaccaatcgaatccgtacggtcaatttgaacttcaaaatgcaggccgttgtttttgaataaaagagcatcagggctttcttcttccccttgataccctacaaatttctcttcttcctgtaattcggttaaactgccatcgtttaattgagcgacaagctttccattttcaaggctgtactgaaccacttccgcatgagaagactgaacgagcggaacaacttcattaagaaaattcttcgcaaacgcaataactttttctcctcgaattggattataagaactcgtgcgcgaagctccattttcttcactgattgcatcagtaccgtaaagagcatcatagagacttccccaacgtgcattagcagcgttaatagcgtaccgggcgttatttactggtacaacaagctgtggtcctgcctgataggcaatttcgctgtctactccttctgtaccaataagaaaatcttctgtcttgccttctaaatagccaattctcgttaaaaacgatttgtattcgctaaagtcaccgtcagggttttcttgatgccacgcattaatttgagcttgcagctgatcacgcttttctaacaaacgtttatttacgggtgttaacttggttactaacgcttcaaaatcagaccaaaaattttctgtacttaggccgctgcccggaatagcttcctcattgataaattgatagagaactggagctactttcagatttccaacttgtttatagtttgtcaccgtctgtttcctcctcttactcttttacatttttaaatttggacgcgctttcattcctttttgccaaaaatggttaagacgaacatatgcggttctgtttcttattacgaaacagtgttttatttttgttaaaaaaatcatatcatcgagcgaatatattttcaagaattttctaaaaatattctatttttttcatttcttttttgacttcagcgcagcggctcggacttggaaacagctttcctgcatttaatagatttttaggattaaatacttctcgtatattcgtttgtgcttgaatttcctcttcattgaaaacaaatcgcatttcttcttttttttcaatgcccacgccgtgttcgccggtaatcgttcctcctgcttctgcacatacttgcaaacatgcgcttccggcgtcgagtgctttttcagtttccccgggttttctagcatcaaataataccagcggatgcaagttcccgtctccggcgtgaaaaatattggcaatgcgaaggccagattcttcgctaattttgttaattcgcttcagcacttgaggcagtttacttcttggaataacgccgtcttgtacgagatagtcaggggatatagctcccatcgctccaaatcctgttttacgatttgcccaccacctcgcgcgctcttcttcactttcagctactttcacttcccgtacgttttgttttttacatacgtctaaaatacgaaggatttgctcttcgataccggctgaaatgccgtctacttcaattaataaaagagcttcaatatctctagggtgtccgactggaaacgcagcagcttccactccttcaatggcggttttatccatcatttcaagcgcagcaggtacaatgccggctgatataatgtccgataccgcttggctgccgtcttctatgcggtcgaaataggcaagaaccgtttgttttgcttcggggtttttcaaaatgcgtaccgtaatttttgtaacgattcctaacgtcccttctgatcctgttaaaagccctaataaatcatatcccggttcatctggaataccttgcttgccaagctcaatcacatctccatttggaagcacgacctctagccctaaaatatggttggtagttaccccgtatttaagacagtgtgcccctcctgcgttttccgctacatttccaccaatggtgcagcaatattgactcgaaggatccggtgcataataatatcctttttcagagattgaattggttaatttaagattaataaatcccggctctacaacggcacgcctgttttcatagtcgacgctaagaaggcgcttcattttcactaaactaataaccacttcgttattaagaggaattgctcccccgctcagtcctgtccctgctcctcttgcgagaaaaggcaaatcatgttcattgcagtatttaacaatgctagaaacttctttcgtattttgaggaaataacaccgctttaggcaaatgtctatgaatggtaaatccatcgcagtcgtacgcaagcaaatcttctttatgatgcaaaatagaatgagcatctactagttgagaaagattttttacgtgaagatcttttattctatttttcttcaacacgatgtgcttcctcctcttctttttgataggcccactccaaaagctgtaccgtgtgaacaatttgctgacttcgtccatattttttcactcctactgccatctgcagcatgcatcccgggtttcccattgaaatcatttctacgtcatgaggcacatgttccattttactttgaagcacagctcccgccatatcaggatttgttaaattataaattcctgcacttccacagcatcggtccgcattagccatatgaaccatttccactcccggaatagaaagcaaaatatctcttggttcttctctaactccttgaccatgagctaaatggcaagcgtcgtgatacgtaatacgcttatgcagctttgtctgcggggctcgatatcccgtatcgtgaaggtattttgaaatatcctggactttttcagcaaagacttcggctttttcaagccactcttgctcttcttctctaaatagttcaggatactctttcaacatgcagccgcatcctgcagcgtttacaataacagtgtccgcatgctgaaacgcctctatatttttttttgcaagctgtcttcccatgtctcggtctcctgcatgaacgtgcaaagcaccacagcacgtttgagatggaggaataacgacgtcgtttccatttcttcgtaatacattaagagtcgcttcattaatatcactgaacatgacgtccatgatgcagccggttaaaaaagcaacttctgcttttctttcggcttttgcttttagaacgcgtttctttttatatttttttcgaacagaacgggtaattttaggcattacatgttccatttctgctagatgtgtcggcatcatatttaacatgcctgctgtgcgcatcattttttgcattccgcttttttgatacagcttcaataagcttcctgcagcttctaagcgatgagagtgaggaaaaagttcttttagaaaaaacttgctgatcatgcctttccatcccgtcaaaggcattgcctgacgaatttggccgcgagcttcttcaatgagtccgccaacgtctacatttgcagggcaagcagttgtacaggcccggcaatccaaacaggcaaacacaggggctgtaaactgctcattcacgcttatttttccttctgctaccgatttgataaggtgcacgcgtcctcttggtgaatgctgttcttgccccgttatttcataagtaggacaagactccaagcacattccgcagtgtacacaatccgcccattttttttcgtctggcgcgtctttccacaaataattgctaaccctttgacatggagcatctttgatatccgctttcgctgaattcacttagattcctcctataaatcgtttatagttaagcacgtttttagcgtccatctttgctttaattcctgctagtaacggaaaatgagaaggttcttctccccatacatttactttttggcggagtataaaaggcaaatggttaacgatcacatatcctccgtacgttttagcagtttcagtaaatgaagtaataacggaaagaatggcatcttctgagccttttatgtagaccgaacaaagaccatgtccaactcctccatgtgcttttatcagcattggacgggacgtttttaatgcagtacttttgtttattacatcgagtacattcatatttggtacgccaatttttagtgcggcttccatttcctcttcgaaagaacagcatgcaccatttggactaatgttactaaaaaatccccaaaatacttcggcttctttttcatgcagcacttttaaaatcgtatcaggcggctgaatacttttgatgtaattctcttgataatgaacggagctttccacatcttcaaagctgattacaagtgtaaacagatgctgccctattacatcttcagctagagaaggatttaataattccaaagcaacgggctctatcatggaatctaagactttgctaacaaacgcatgaatttcttcgatattgcctgttgaaaaagaaataaagacaatgctttgatacttgggcagcggacgcagctttaacgttatttcggatataacgccgagcgttcccattgaaccaataaacagcttattcatatcatagccagccacgttcttgacgacttttccccctgaacgaacaatggttccatctgaatatacgactctcataccgattactgcatctcgagctgatccataagacaagcgctttggaccactttcattcgctgcaacaactccgccgattgtagcgtattctcctagagctgggtcaagtgaaacttgctgattataggtttttaaatacgtttgtagctctccaaacggtgtaccagcttttacagtaaccgtcatatctcctactgtatgttcaacaattccgctgtattcagtcagtgaaagtaaaaggtcagctgtctccataagcccgccaaaccctttttttgtaccgttcccttcaatgatgactttttttccgtgttccgttgcatactttaaaacggctgctatttcttgctctgtagttggcttaacgtgaagggatccgttatttccaaggaagggattcatatgctgttcttcaagtgtggaagaattaaataaaatggattttaaatgacctggaagctctaacgtactcaataaattgactcctctcgttttgtaatagcaaacaacgtttcactagtaacagaaagaagtgctccatataatacgactaaaagtagtagattaataagaaggataattagtagaatagatgaaaagatatatttcaagcgcttacaatcattaaatcacctattcttgggattttcaaccaatattttcttcatatcaataaaaaaatgtcccttcttttgaaaaaagtttcttttggcacttgcctatcctaaaaggattagaatataatgtaagcgaattcatttttacataagtcatcagatgaccttatcatcgtagttttgattgttttgttttactaaatttgtagttcactaatttgaaaatgaggtgttagttatgacatggacacagcagttcactcctgtaggaaacagcgtcatttggtcttcattaatcgctttgattcctattctttacttcttttgggctctggctattaaacgaatgaaaggttatatggctggggttacaactttactggtcgcacttgccgttgcaatacttgcctacaaaatgccggctagcatggcttttatgtcggctagtcaaggagctgtatacggtatactgccgattggatggattatcattacgtccgtttttctttacaaactaaccgtaaaaaccggtcagtttgatattattcgtacctctgtcgtatctattacagaagatcgcagacttcaagctttgttgattgctttttcgtttggggcttttcttgaaggggccgctggtttcggcgcacctgttgctatttcagcagctctgctggtaggtttaggatttaatccactgtatgctgctggcttatgtttattagcaaacacagcacctgttgcttttggtgcaatcggtattcctatcacggctatggaaggtcctactggagtagcggcaatggaaatctctaaaatggtaggccgccagcttccttttatttctgtatttattccgctgtatttggtttttataatggcaggatttaagaaagcagtagaagtactccctgctattttagtatccggcatctcttttgcccttacccagtttgtcagctctaactttttaggaccggaacttcccgatattttatcggcactcgtttcactttttgcgcttgctattttcttaaaattctggaaaccgaaaacaacgtttcgctttcaatctgaaaaagcagcacatgaagtagcttccgcttcggctgagccaagagaaactcaagatcaacctacattcacgggggctcaaattgcaaaggcgtggtcaccttttttaattttaacgatctttatttctatatggggaattcctcaaattaaaaccgctttgacaggacattatgaaggagctaacgcttttttgagcgctatcaattccatcggacattatttaacgtttatgccagaagtaccttggttaaataatttaattttaaatggaaatggagaaccgattgcggcagtgtataagttagaattactaggcgctgccggcacagctatcctgttgtctgctgttgtcacaaaatttatcgtcaacatctcttggaaagactggttcattacgtttaacgagacgtgcaaagaattagcgttgccgctgcttaccattatgtccgttgtggcatttgcttacgtgacaaatgcttctggaatgagtacaaccttaggactactgctagctaaaacaggcgcgttatttccctttttctctcctgtactcggctggctcggtgtttttattacaggatcagatacatcggccaacctattgttcggcaacttacaaaaaattacggccacgtctattggaatggacccgcttcttgctcttgcagcaaattcttcagggggagtaaccgggaaaatgatttccccccagtccatcgccgttgcctgtgctgcggttgggttggctggaaaagagtccgatttgcttcgttttacggtgaaacacagtttatttttactgctgattgtctgcgtactaacatttttacaatctaatgtattatcatggatgattccttaatcaaaaaagcttccgtatctagaggtatccctctgcgcggaagctttttttcttcatttacgatcgattaatggcatatacaacaaataaaacaatatctagcaaaatcattacaacaccaaaaagcagccagacgtttccttgagtcttcttctctccttcttgcatttcaaacgctcgaatagcaaatacaattccaagtgtaaacacaagaaaaaacagctgacggtaatcgaagaacgacagtacgacaaaaattaaggtaaaaaacaccataatcatttctaaaatccgataaggttgcttttgacatgctaataaaagtttcatttcttgacctactttcatcccgttcttaatagcgttattttactattaattttaaatgagatgttagcgtttcgtgcactgttcactgttttgtaacaaagaagcgtacgttagttaaacgcacgcttctttttcattcatttacatttggattcattggattatccatccctgttttatcttgaatttttttatagataaaatacgtgtagacggcaattaaaatggagaatgcccacgtaacagcctgacggaatacaatcatgttcccgtacccttctactccgtacttttgaatcaatacgtattttacaattgctaaaaatacatagcgacctgcgaacagtactgtaagccagttcatcattttgaataaatcaggctggtggaagagttttagagagtcttctcgcttatagcccattaagtaagccgtatctacaaaaaagtacaaaccaattggcttttttatcacaatggtaaaaaggacaactacagccagtccaatcataaagtatacttgattgtttaacatcgttgctgcgttccctgaaattaaatcaataatagtacgtgccagcagcgtaatgacaataaacaatcctgttacgttaaactggcgatctttaataaatgtataaatggtatacacaaatgctggtgctgttgaaagcaaaatggcatagtaatcaccaataatgtcttttccttggttccatattaggtaaggaatagcgatataaaaaagtaaatcaaaccatactcgttttgtattgttcatatataactcctttaaaaacgttgttcttgctattatatgggatactacgcaagaaaaaaaggcttttacctggaatgttatgaaattttaatcatttgatgtttagatccagagcgacagggaaaaagatttctagaaagactttaagaatcataaacatccaaacacttgagcagcaatacatgtgccacaagtgaaaaatgctgaaaggattgattcattatcgcacttcacctaacgtacacgtcagaaatggaaaaggccatgcagctttctcacggcgtggggtatgctgaatatagccgtaaactagacaaacgtctacaggtggaaaaagaacgagaaaaagattatcaggctagcaaagatatactgcgtgatattaaccagcatcgataataaaaagccgcttgctacttttggtagcaagcggctttttatttacaaatgaaccaaatttatacataataaggaagtgcgtataccaaagaaaggaacttgcttattatgatggaaaaattactgattatttgtgtgtttgtaggaattattcatatgattgaaacactagcctactctgtgaggcttgcgggcttaaaaactggaaaactagtcgtggctttatctctttttaatattattgtcattgtgtcaagaacagctaatatggtgcaagctccgctgaccggtaaattaggagatgcggttcagtctaaagaagatttgcccgttctgcttcatcagcttcaaactatcttgctcgcggcttctattggtacaatcgcaggtgctcttttaattcctagctttgtatcaattttctcccgaatgatttcacatttagaagtagcgggatctgtacccaaaatgatgaaaaacattacttccatacatacgctggaaaaagcaaaaaaacacgtgaagcgtcctaggtggattatgctgtctcagctgcgaataggcggagtgcccaagcggttgcttcttttaaatttaatggctacgaccatttatacagtaggtgttctttccactctttatgcttctacgctcgagcctactctttctaaatcaattttgatgtcttctggtcttattaacggactagcgatgattacccttgctgtgtttgtagatccgcaagtagccattttaactgaaaaggtaatgaaaggtgaatctactaagcaatctatgaataaaatggttggtacactcgtcatctctcgtttgtgcgggacagtatgtgcccaaattctcttagtacctgctgctctttatattgcatggatttgcaaattaatcccttagaaaaaagacttcgttaaagaagtctttttatacatattccacttttttgtatctatgaacagcagcgattaaaagaaaaaaactgctcattaacgtaacaactacggtataggtgacactttgtgaccaatgcaattgttcaagcagacgagcggcgtattgtgacagcgctgcaggactccactttaattgattcgtaaacaaagtactcaaaaatgaaagtaacgcaatgatcaaaatacttactccagcaattcctccgatttgtaaaagaaatgttccagctgccactaaaacggacaagataaaaatcagccacaggctgtataaaagaaagctaactagcatatgagtccaatccacatatgaaaataaaagatttgtataataccatgctgctatatagcttataaacgttgagccaatgaccagtacgatttgcgcagcccatttactcataatgtattgaatgacgctcaccggtctcatcataacaagtatagcagcatgattttgtcgttcatttgaaattatattcatgcttgctagtacaatcagtaaagttcctattgtgctatattgtgaaaggacaccttgcattacttcttgaccggtgggcgtaggaagttgaataattgctccttttggtaaattccctgccatgttaatgatttgtggcatataataattcgttaaaggctgtgtgatgcctagtaaaattagagagattggcagccaaattcctttgccgttcgcaaataattcatgcagttcctttttaaataagactccaaatgtgttcatttgttcatcacctctagatacacatcttcgagagaatgctgttttcgttcaaataaaacaaggtttgcttgttgatcaacaagcagttgaagcagttgctgctgctgagatgtatcttttacacctacagtggctttataaggagaatgaaacagcacctgttcacttggcagactgctaagtgatccagggagcctttcttctgtttcaatcgtaaaagcaggagtcgtaaactcttggcgcagcgaactctttgttccattccatttcatacgtccgtttttaatcataataatgttatcgcatatttgttctgcatcatgcaaaatgtgagttgaaaaaaggatggtcgtatctttttttaatgtttcgataatcattaggacatcttttctgccttcaggatctaaagccgaaaccggttcatctagaattagcagttcaggtttatgtaacaaggcttgcgccaagcccaaacgttgtttcattcctccagaaaagccagcaattttctgcttttcctttccttttaaacctacagtttcaagtacttcatctattcggtgggaaagcacattttttgaaatgttagataaaagacctaaaaaagttaaatactgctgaggcgtcatccaattaaaaaacgtaggatgctgtggcagaaagccaataaatgatcgtacgtcttgatgctgtttatcttcaaaagaaattttccctttattaggtgcagtaagacctgcaatcatatgcaaagtagtcgtcttacctgcaccattagggcctaacaacgctgcacattttcccttgtcgagattaaatgaaaggttattcacaacagttatattacgatacgcttttgtcagtctttctacttgcataaacatcttagttccacctcactgttttttacgtcctaaaacaaaatataaaacagggccaactgtacttacacataaaatgatgagtccccataaccattttggcccgtttgtctcttcttgctttatgcagcttatcaatgctggaatcattaaaagcaattgtaagaatagaattggagcaattaacaaccagttaatgtccttcatttacatccccctttttcttcgtgctggcagccaaataataaaaaaccaataaaacagcgttggcattggaatttgaatcagtccccatattccccaaaaccatggatgagcgccgcgtttttttgcattgataaaaagtagaaagctttgaagaaggagaaatggtgaaataaacagcacaagaatccatttttcattcattataaaaacatctccttttttcgtttatagtgaaagacgataaaagaaataggagcaacaatgatcccaattacttcaatggcgataaataaggcaggtatttgtaaaatagcagttgccattaccgttaaaataacaagtgctgttaatgtaaataaacataactctttccggaaagcttttttctgcttttgtttttgaatgagaagctgttcttgaattgcatgaagagaaatacgttcatgacttgctaaactctctagctgctcccaatctttttttaaagaatgtaaggactgattgttattttcttctctcattctttccactcctttctcagtatgtttactcctttatttactcttgatttgacggttcctgctcgcatattcagcatatgggcaatctcatcgtatgtatatccgtaataatgtcgaagcaagacaggaattcgaaagcgcgaatcgagttcgttaaaatcggaaaacatctcgctccattccactcctttgtatttagctttccactgaagctggtgcgataaagactgctttattcgctggagactgcttttttcccgtttttgcttacgcaaataatccatgtacagtcttgaagcaatggatatcatccaagtcgaaaactttgcttcatttttgtatgaagaaagattcacgtaacacttcatcattgcttcctgacacaattcactgcataagtcctcatctaatgtcagctttaaaaggtatttatataaaaatgaatgatagcgctgaaataataatgaaaaggcatcatcatcaccttgtaatgctttttggacaaggatgaaatcatcttgttccaaagcggtcacccctcctttttgtttcatcacctatatgacgctttagcgattgaaatcgttcattttttatataaaaaaaacgcccagctggacgtttttatttagtacgaagtatttttaatccttcttcatcttcttctaagggatagacttcgtcgtttttagcgaataaaacaccgtggaagatttgaaggtcatcatcacaggcttcacaaaattccttttcgccttcgttccaaaagctaaaaagcgctagttcatcgctacgcacgcttgcatatttttgatgaaattcataaatcatcatcgcatagtagcgaagcgcttcttcttttttttcaaattcaatagtttcaataatatctttttcccagccttctaaaaatagccaaggttcacaatcgctttttattttatgaactctccatttatctgtcatgatagaacatctccttacttacagcttacttctaaaatttctcttttccttattattcagcaaaaataactttgaatcaagtaaaacggaaaaaacgcctattttcaggaaatagacgctaacaatgtggcttaatctgaacttctcttttatattaataatagctccttaaactataaggaactaaactgcccgtataatactgggtaatgggaggaaaaacgcctgctgaaggcgtgatttcccccaccaagatggttttttgccccgccagttgtccatcgctccatcaggtgaaacgacaaatccaattggacgtgcaaacgaaggcataaaatacggatagaacgaatactgaaaaggcgtatagaaagaagagtaaaatatctctttctttatccgtttccgaatccgttttgatcagaaccatcgggatcgagcgtatttgtattagaaagtcctgaatttgtatttacacaaattcctgtatttgaagaccctgaaccttgtgcagttttactgttactttttggagaaacatagtacgtatcgccaaacgtaacgactcctcctgtaacgtttggaatcactacatgattaataacaatcggcattatcctcaccctttttattttcatcatgatgtaatatatgaacgatttatcaaaagggttatacattaatggatataaataaaaaatccccctgcagagtggggtatttttacgcttttacctcttttttagaatgacttaattcatctcgcagaatatcaaaatctcgttctgctacttcttcaattttagtatacaattccttctctgttagaagtcctttttcttcaagtatttcgacaagagccttaaactttattctagataaaagcatttcgtttacggtgctctctgttggctgttcatttttcacttgttcttttgctttaacaggttcttgctgcagcttcaccctgaaaacaatattcgtatgatctgtaatttcaggtgactgataaaatgtgctatgcgaaatgttttttagtgttagcgtttcttttgtctccatatttgttacttcaaaatacgaatcctcaaaaaatgcatcatatttatcataagctgctttgcctacaaccgaaaaagaaaagtttagccttttcaactcttcacctgtattcgcatcagtaatcattttttcttcaaacatatcaacgtgaaaatttacgttattaatcattagttgtgtcaattcaatcgcctccttctttattaatacgacacggagtgacatgttccctgtttttttatataaaaaaacatctcccaaaaatggggatgtttttcaaggagctaaaaaaatgctcttttttagctctacaattcttcttctgctttgtcatatttgcgttcgtgtgccgtatcttcttcgttatcacgaatggttttttggagcacaaaagcagacattgttaagtataaagttccaacggcataataaccttttaccggtaatgatgcatctaaggtataaattcctataaacatagctaatagtgctgtaataaaagctgtccatgctaaaaatgtaaaagctgctgtattacgctttttcatcgtatgacctcctcttttcctttttctgttaagcgtcgctttcattttacattgtaaaataattgttgtcatgggtatttatagtcagttacccttttaatcagaacaagaaacggaagaatttgggtcttacatcctgtttttatcataaagctttttttcgaaatgattagatatatggaatttttctttaaaagtatgttcattcgttttcattaagaaaagctccaagtaattattgtaataaaaaaatcatcgccgagacgatgattttttgtttagccttcaaagtattctttataaaagccgccgacttggccagtgttatcaacaacaaaataaaactcttctgtttcgtttttcacatcatatgtttttcctgctgttaagacattttcaaccacgaatttttttgcatctgtatgtatgcattttacttgtttaattgttggacgatcgttccattctaaatgaatcatgtatgtacactcctttgttttcattcaagattcattttatcttacttgaagtaaaaaagaaacggagcgaatttaaaaattaaaaaattcgctcatgcactttttttttggcaactgttgcttgtacaaactgtgccgtttgtgcaacaattgtgtctttatcaaaatccatcgacgcaacatggtaagagtttcgaagcatgtgctgtcttttttctgctgattgaatatggcttaagatataagctgaattctcaggcggtactacgttatcaactgttgatgttagtactaaagcagggcacgttacataagataagcgttcttttgtttcgtccattaaagaaagcagctcacgcatagagcgcacgggtactttatcgtacgtaatttcatgtacgtttggatctttaatatcaggatgctcttcttttaaataacgaggcgtatgacgagagcgataaggctccattgaaggaatggacgtcatagccggattgattgcaataactccgtcaaggtctaatccttggcttgctgtatgaaaggtaagagtgcctcccatggactgacccaagataaatacatgacggcattcttgcttcaaacgctgatacccagttaaaaagtcttgcttccattcctggtacgttgtttgttcaatatcatagtagtgagtaccatgtcccgttagtcgtaaaccgtacacagtaaaacctttttcagctaattcttttccgatatattccatactttgaggagtccccataaatccatgagaaacaagtataccaatgtcgttgcctttataataaaaagattctgcgccttgaattacgtcataacgttccattttcttcaccctttatcacaaattttctgactaaatgaactatctttataatacacctataattcctataagtcaactggggtatttgtttttttacgatttaaaaagaacgaagcaagaattatctcttgcttcgttctttttggatatgtggaaatactagctcagcaaacgtatatgcttcttctagatgcgggtagcctgataaaataaatgtatcaattcctagctctttgtactcttttaaccgatccgctacaatttcaggacttccaacaagagcagtgccagcaccttctcgtgctaagccaattcccgcccatagattcggagcaatctccagtgcacctctatcttttgtgccgctgtgcaaacttgactgtgttttttgggcagtggagtcaaatgaggcaaacttatcttgaaacgctttgatcgtatcatcattaacatgtttaattaatttatctgcagattcccacgcttcgtcttccgattctcttacaataacgtgcaggcgaataccaaagcgaatgtccctgccttcgtttgcagctttttctttcatatcatcaatttttgttttaatcaccgcaggcggttctccccataacaaatatacatctgcatgctttgctcctacttcttttcctgctggagaagacccgccaaagtacagcggaggatacggtttttggataggaggcgatggaatgtacgcgcctgttacatcaacatactctcctttataatccactttttttccttccattacatctcgccaaatcgttaaaaattcatctgttaactcatagcgtttatcgtggcttaaatagttaccgtacgttgcttgctccacgggatcacctcccgtcacaatatttaacataagtcggccgtttgacatttgatcaaatgtcgaagccatccgtgctgaaagtgttggagacattacacccgggcgaagtgcaattaaaaacttcagtcgattcgtaacggaagcaagtgccgatgcaatcacccatgaatcttcacaatttgaaccagtgggcaacaaagcgccgtcatatcctagataatccagtccatgtgcgatttgctttaagtagtgaatgtcgcttgttctgcttccttcggttgtgcctagataatgtccgtcgcctgctgtagggaaaaaccataagatgttcatttctatttcctcctaaatattctcgtattctatataaagcgttttcatattgtttgtttaattcttgtccgctaattatagagatgcatttttatagtagcgtatgtaatacgactctttttatttattaaattagtaaaatcataatacctctttaacctatatgtcaagtatgaattggaataaaaaaaacaagaattaaaagtaattcttgtttgctttatttcctcatacgtgaagccatcgcgttagcaagggttgattttgttgatatattttcaaacgataaacctaaatgagaagcggtaatcgcgatttcaggacgtaccccagaaatagttgattctacacctattaattttaatgcatcaatcagctggaaaatctgatgagcaaccatcgtatcaacaataactactcctgaaatatcaatataaaggtgattcacttgctgttcagcgcagcgagttaacgtattttctaaaattcggcgcgctcttgctgtgtcgatatccccaacaagcggaagaatcgcaatatgatcgcttaatggaataactggcgagctcagctcattgatcagctctttgtgtgcttcaagtaacctctttgcatgctgatggtgctcttctacaaatttataaacggtgatatcaaacacgcgtacaatcaattcgttccattcgtctagttcttcttgcgtaatatcttgctcgtactcttctacaaattgatttaaatacgttaaatactgttttctaactcggaaaaattctcgaataatataatgaataggcgttcttacatgctctccgtcttccgcaatctttaaaatccacgtttcaaatgaatcaaaaaattctttttcactttttataaatacatcggctatgtataaatggaattcattattttgatcttttaatactgaaatgacttccggatgagtagatgcataaactgattctgggtcattgtcttcaatgctttcataccattcttccgtcagttgatccgcatgttttaaaaaaaacattcgaagtgcttcatttttattcaaaacgattcccctttccataccagctactgctatcattataattcaactttttcacccttactagttttataaaaagagaagaaagaaaattattcttttaaatacgtgtagtttatgattttatgctacattgaaaatagttataaaaacacaaaggagttttcaaatgatacgaacgttagctcttacgaacgatgacatacttgtgaagcatatacaattaggtcagattcacgatccctctattcagtactattggattgactttaactgcccttctgaagaagaagcgctgctgcttcaatcatcctttcactttcatccgttagcgattgaagattgctttcattttctgcagcgcccaaaactcgattattatgaaggatacagtttttttgtccttcattcattaaatcgtcaaacgttagaagctgaagaagttgacctttttatcggcggaaattatatggttacttttcattttcacccgtcagctgcaattgataaagtatgggaaaagctgcttcatacaccttcgattcaagaaaaagggataagctatcttgcgtattctgtgatggataaagtggtagatgaatatttccccactgtatatcagattgaagatgagctgaatgatatagaaaacatagatgcaaaaaaatccatctctgttttaatggaagatgtattcaaacttcgaagtgatttgctaaaaatcagaagaaccattttgcccatgcgcgacttattgtaccgtgttataaattctgaacgcctagatgttcatccggaacaaaaaaggtattttaaagatgtctatgaccacttattaaaattagccgatatgattgaatcaaatcgggaaatgacgtctgatatgcgcgataattatctttctcttaattcaaaccggatgaattcaatcatgatgacactgactgttatttcatctatctttattccccttacctttatcgttggcgtatacggaatgaattttgaaaatatgcctgagctaaagtggcactatggctatttctttgtgcttggcttcatgggactgataacgctggggttaattttatggttcaagcgaaaaggctggtttaatactgataaagagtagaaagattgagacataacgaaatcaatccaatgtaaagacgaatgtaaagacgaacaaattggataagtaagctagtgctgtcaatttccgcacaagacttcgctttcagggggcggccaatgagcctcctcttcgcttagactcctgcggggtctcacctgttccgcttttcccgcaggagtctttgccttgccctccaattaacagctattacatacggtaaatctacgttcaccatcacaatgaaaaaatccgaacgagttgaattctccgttaagaatctcgattgatcgttcggatcttccttcaccgaaaatacgtctgtcccagcttcttttctatgggaaggtaactagttatttcccgaaaatattcataaaataacgtgcttacgtttcttttttgaaaaagtttcataagatagtgaaaataatgctcaaaaaggaggctgaagtagtggatattaaaggcaaacacttgctaatggatgcgttcgaatgcgatgaagggatattaaacgacccctcactcttaaggagaattcttgttgaagctgcactagatgcagagatggaagttttgcactgttattttcaccagtttacgccccaaggcattacaggcattctcgtattagctacctctcacttgtctattcatacgtggccggaggaaaactacgcttcattagatttttatacgtgcggagacaaaaaaataattgaaattggttatgcgttgctgaagcaattagcttcaaaaaaagctgttgtgtattcgatttctcgcggaattcaatacgccgaaactccaacaaaaaatcgtcagcatgctgaaaacactcgtcttctcaatcgtggagatgactcagatcacgttagtctaaagcaactcttatcaggccagcatgacattttgtttcatcaaaaaaaccgtattcaagatattcagctgattaaagcatcggatattcgaatgtatttggatgaacagctgcaatttagttcattggatgaacatgcgtaccatgaagctcttgtacaccctatctttgcagcttccttacgtcctcaccgcattcttattctaggcggtggagatggtttagctttacgagaagtccttaaatataaagaagttaaagaaatagaccttgtggaaatagatgctgacgttgtaaatgctgcgatgaatgtagaagaattaaagaagttaaatcaacgctcatttgaagattctcgtgtcaccgttcatattcaagatgctgttgactacctctctttgaattcagcgtgttatgacatcatcattattgactttcctgatcctactaacaaaaaaataagtgctctttatacaaaagaattttacgcacttctccatcgttcactatcgcgcagcggcttggtcgtatgtcagtcaaattctcctagagacacacctatcgttttttggagcattaataagacgatgaaagcttctcagttttatacgttgagctaccacaccattattccttcttttggagattggggttttcacatcggctcgaaaacacctttgtctgcccctatactctctactgatgtttcatctactacgctgccgtcagactttactaagttaatgcgtttttctccccattctctttccaaaaaacagtttgcagttgtgaactctgctgagcacttggttctgcataaaatatttaaaaaagaaggcttatatttgtaaaaaaggaaagcttggcttatacattccttttcttttgacatactaaaacagtctcgtcaccactgtgcaatagaaaggattgttatgagaaaaatttcgatttttgttatcttagtgctaactgttattttcccttcccccgcttttagccaagtgaaagtgcctgtcttgatttaccattctattgatgcctacacaggccacggggaaaaagaactgtatgtgacgcctgaaaattttgagaaacaacttctttatcttaaaaagcaaggatatacgccgctaacatttgaaaaatggcaggaactaaagcatgtgaaaaaacctatatttattacatttgacgatggatataaaaataatcttactatcttgcccatttttcaaagagcagccagccctcaatttcatccagcggctacaatttttgtgatttcagattttatcggccgtcccaaccgtttgtcgccagcggatttaaaaaaatttgttgattcaggatttttttctattcagtctcataccgctactcatccggatttaactaagacgaaaaatttatcctacgagctagctgattcaaaacgaaaaattgaagccattacgagccagcccgttattgctcttgcttacccttacggaaaggtcaatagccgcgtagtggaagaaacaaaaaagaattatacatttggcctttcaacgattccaaaatctttcactgagagcggacaaaaaaatgaaaactatcttattccccgtctttacgtcacgtattctacaacgattgaagattttgctaagctattaaaagaaagctaaaaaccctttcttttaaggaaagggtttttagaattttgttatttctagtcctcgctcttgctgccattcagcataaaaaacttcgctgtattttttaattttcttgattgcaagctgttttttcaaccatttttcatctacgtttgcttctttcaaattaccaggcactacttttccatccatgattaaggcaataggtaaattggtttgagaataagggatatttaaatcatttttcgtcggagggccgaattcgtgtttaggagcgacgctcacctctccatttgtttctaaaatgacgtattctgcttcatacagtgaaaaatacccttgctgtctcattagatgctgaagctgattcaagtccaagttgtttttcttaagctctttataaaggattttccctttataaataatcattgaaggctttccttcaagaatccctctaaatcctgtaaaggtttgagatagctttgtcactgcgtagatcagaagcccccaaatcaaaacgctataaagaatttcagttaactctactcctttttcaagagctgcgtcccccacaatatttcccaggacaagcgtggtaataaagtcaaacggggtgatttgagcaaactgcgtcttacctaaaagcttcagcataataaatagcgctaaaaatccacatatcagttcaatcgcaatatctttatacatcgatacccttcctctatagcaagcatgttatagtatcagtttgtatcatatgtgagagtgataaacctgacttttcatttttctttccttctttctccagttatagaacttttgattaagcttttttcttacttgcataggtttctaacgttgcatattgattaaaaatggatgcatctgcttttttccctacatacctaaggtgccatggttcgtatttatagccggtaacctgttcttcaccttcagggtatcgaataatgaatccgtattggtacgcattttttgaaagccaatgagcctctgatgtagcagcaaagcagtctgcggcagcacacattccgcttcctcccgtgacatcgattgctagtcccgtttcgtgttcacttgttccagggtaggcgctataggtgcgtgcttgttcttctccgtctcgctttgcgtaaaatgcaaaaagctctttttgacgctcgtgagatcgataaccggatacaccaagtaagctgattccctctttttcagcatctcggaaaagttcttcaagcgcttgtgctgcaggctttctaagcattcgtttttctattttttcgttgaagataaacggaacgtcggcatagactaaatcggaaggctgataggattcaggaagctgatgctttttattaactaaagctgtaaccgattctggattggctattaccactgtttcgtctacttgagcctgtccattttttgtaaattctctagcaggctttgatgaagaattgtttgtgccgcaccctgctatcatcagcgtaaaagctaaagaacaaatgaataaaaagtatttcatgatgtcttactcctttcaagcggcttttgatgcgctacaaaagcctataaagaaaggataaaatataaatgtttctgtctgttattcagttgtttcaaacttgtaaacactctaaaaaaagtaaggtgtgaaaaaaatagaaatagactgcctaagcagtctatttcaaaaagataatatacgtatgaacttgattttgcgtaaagctcgatgcaactagtttatttcctgattgactccaagcaagctgatcagcggcatagtctaaatttacgtttaagtgtgtaacatctcctgttaatccatctgctatgaatatccctttatctccctctttttcagaaataaagttataggctaatttcgaaccgtcgggagaccagcttacgccaaaaatttgagtggacagagcaagctgaaaggcctctgatccttttaaatctgtgatagacaacgttctcgtttgggcatctttttgctgaacgagtgctaattgttttccgtttggagacgggataatagaactcacattatctcggattttttcagggttcgtctgttcgttatgaagaaaaaaaagctggttgtttacaccaatataataaatgccacctattcctttaactgcatctaagattcgatcgtctctgtgcaacagaggttctgcttctccttttacatttgctttagaaagctttccttccattgtaataaacattacttctgaattattaagccactctccgcttgatggatagagaagaacattctttattttaaccgttttttttgtttgaaggttcattatataaccaaatgtatcttcgccttttgctactttataaaaaagataatcaccattcggagaaagcttcgccgcatgttgaatttcattgcttggatgcaacacaaaagtagacttgttttttagattataagtagctagattctgtgcatatacctctttgggaccgaaatcgtgcgaacgaaattgtttattttctttactaacaatcattgtgttttcatttaaaaattgaaacgcccttacgccgttaatatcctgaacatctttcacttctatttttccatctttatctacttggtccaatatagtaattttcttgtcgggtttttcaacggtttctctatggctttctttttgtccgcatgatgttaaaataagaaaagtgcttgctatacatatcattaatctataccgtttcaataacggttcactccttttagctaactcatttctctggtttcaaaggaaacgacactttgaaaatcgtccatttagagtcagaatgatgcagcctgataacgcctttttgtttttcagttaaatctttggctaatgctaagccaaggcctgtacctccggataaacgcgaccgatctttatttacggtgaaaaatggttgaaataatttctcttctgcttcgggtggaatccctattccggtgttagctacatccacaataatagaattctctaaagtgtaagacgttacttccacttttccgcctggttcattatatttaatagcattgtcaattaaattgataaaaatgtgtattaaactttcacgatcagcccaaacaactgcttctttaatatttgtatgaagagtcaaatcaaatttagctgcttttcctttcatacgatcgcatatgtcttctagaagccgcttcaattcaacttgctctggccgctgctcgaaatcatatttttcaagcgctgaaagctttaagattttatctaccatttcatgaaggcgattcgtctctttacgaatattctgcacgccgtcttccataagctgaggatcatctcgatacatatcaagtaagtcaacataagctttgatcgatgttaaaggcgtcttaaattcgtggctgatgttaccgataaactgcttttgctgctgttcaagagactgcagtttcgaaatagcaaactcaagctttcttttttcttcattcatttgatcgatatttttttcaatcgacgtactcataaaaaacaagccttgactgagctctccaagttcatcgcgtcgtttgaacggtacatcagttaaataatggccttttcgaatctgctgtgaagttttttgaagcgtagcgatgagcgaagcaatgcggtaaaaataagcgtagccaattaaaaaagctactgctgctgcaatcattcctcccatacgaaataagtgcctaatatcagctataaactgctgattattttttagggaatggtcaaaacgaatggctccaataaattgattatcgattgacacaggtgcgaagtaaataagggaagaacccgagatttgataggctatttttcctttcaaagcatagctaagcgtatcagaaacatccacatctttttggccgatgggaatagagcttcctgcttcctgtcctttttgattatataggactgtttgcattccgctttgtgatgcaatcgaagatgcaaggcgctgtcctttttgctgaagaaaagaatctgtattcagagacgggtcaccggttacataactttgatgaatcgtctgctcggctgctttgcttttttgaataagttcactttctagctgatcacgctgatttgtctcaattccttttaacacaagtacgctcagtacagttactgttaaaataattaaaaaagcaagaacgagtcccatcttagcttttaggctgattttcattcattgatccctgctgtcgctttatatccaaccccgtataccgtttgaagcaaataaggctctgcttctcctactttttttcgaaggcgctgcatgtgaatatctaccgtacgtgtaccgcctgcataatccattccccagacaagatctagtaaatcttctcgtgtgtacactctctctaaattggcaagtaataaagcaataagatcaaactcctttggtgtaagcttaactaactcattggcaacatgtaacgtgcgctgaattaagttcaccttcacttttcccaccgtgatttctcccacagcttcaggagcttcatttttttccattcgccgaacaagtgctttagctctagctacaagttctcttacgtcaaaaggcttggtcatgtaatcatctgcgcctaactctaagcctagaactttatcgacgatatcatttttaactgttaacaagataatccccattcctcttcgattctcaagttttcggcatacttcatagccggttaatttcggcatcatcacatccaatatcatcacggcaggttgaaagctttttactttttcaagtgcttcttcaccgtcagatgcggtgtctacaatatatccttcgcgcttgaaagcataggatactgctgtagcaatacttttttcatcatcaactactaaaatctttttattcaatgtatcacgtactttcatttgatatttctattcgtctatcttatcaaacagctttcccaaaaacatctccaagttgtttcgaaattgtaaacaaaaataaaaacaccatataagatggcgtttttttagatctaatattcatttgtaaaaggaaggattttatgcgtattcaaatattgatgaagcagatctatacgctgctcgctgctaataaaaccaatgtatccgtccggtctaataacgtacagagcatctttttgaagccctgctttcttcaagtaagggttccaagaaaactcgtgcaaggagaagtctttttcttgcatgcttttttttagcttctctgctgctgttccatagacatgtatttgccagtttaaagactgtaaagattcaaaattcccttctacatagggtaatcgatcaccactttgcacatttgtcccttgcccgctgcttaggtcactgtttcgatacttaatgcggatttgagataaaatcgtaaatgctttgtgacggggataagggaaacgaaataaaaaggatagtacaggcggaaagatatgcttcctaaaaaattgactcgttttatctcgtgccaccattcgtttaaaagcgcgatcagttgtatttacaagcagctctgcaaaaggcaacctttcttcttcgtatgtatctaatatggaaagtgccgctttgtgttgaaggacagctgctaatttccatgaaaggttgattgcatctccaattcctgtgttcattccttgtccgcctgcaggactatgaatatgggctgcatctccacttagaaaaatacgcccttgtcggaaacgatttgctactctgtgatggatatgatatgtcgagaaccaatttataccctcaatctgaacaccaaatgttcgttgaataaaagcgtgaatgttttcagcttttacatcgttttgatctctaaaagctgaaggaataatgccaatcattcgatacgttcctttacttctaaccggcatacaaatcaaaaattcttcattgctaaaggaaatactgattttttgatccttcatcacttcaccagagccgtgaacatccatcacataaaaatgctgtttatatttttctcctttaaactctatcttcatttgcttgcgaacggtactgtgtgctccgtcacatccacaaatatacttaaaataagcggtttcctcttgctgggcttttaataaagtttttaccccttctccgtgttcagctagagatagtaactccgtcctccattctacttcgattccaaaattttttaattttccaagcagaaaccgctcgtggtcgtcctgtggaaatgtaagaacaaaaggaaaaggacttaatccttctcctaaagatcctagatgaacttttgcttttattttattcttcactcggatgtatacatcttccatcttaatcccgctgtctatgacttcatctgcaaaaccgaactgctgataaaattcaagtgttcgcggtaaaatagccattgcccgggaggcttgcccaggtccgtcgcttctatcaataattcgaaaaggaatgttatgtctggctaaattgtaggccataacgaggccagtagggccggcaccaacgattaggatttgtggattcatcatcatctctccttttcattcagttacagtatcttttatattgagcgagacttctctttttttacagaagatgcaggtaaagcagaagtaaacagagcacacaaacttattaaagagataagagctagagcagatacagaaggattccatgtcagatgttctccaaagaaaaatagttctcttacgccatctaccataaatctcattggcagccatggataaatcaactctctataaaaatcaggcataatttctggggctattgaaagcaaaggtgcgccaaaaaatagaacaataacaaaaatcggaagtccctttagtcctagccatgaaagtacggctgatatcaaggtgaaaaaactgaagtaagcaatagctaagaatagtgctgtatccaaaaatgaaggaacgcttattccaactacttcagccagccacgctagcccgaaacctgcagctaaagcaagtataaccccgatgattacgagtcctacttggttaacgattttctctttacgagaagaaaacgtgattttttgaatgctgaggaagatcattgcagcaccggctatacttgccatccacagcggctgaaataatgaaacgggggcatttccgttgacactatgagtccctgtttcgtttacgtttatcactgtcttttgaatcggtgcagcgagtgctaatgcttggtttgcacttagttgcgttccgttttgttcaaatcttttcactagctgcaagcgcatattttcattcatcttatcaactgccccgtttagcacctgacttgctagggttgaagcagctgtattcattccttgattcactaataatttaacagcaggtgtatcaggcttagccgtctgaagagtcgcctgtttttttgtgaaatcttttggaatgataagcgccccgtagtattgttgattatttaaccccttttcaacttctttagtatttgagacaaagatccatttaaccgaagactgttcggtatttgcctgtttcatattttgtttcatttgatttcctatatttacattaccctttgctggaactgtcattccttcgtcagcatttacgaatgcgattggcaaattcttaggtgctgagcttgccgaaggaattaaggttagaataaagataaaaataacagctactactataattggtgaaaaatatataagcttttgattccctaatttcatatagatctctcctttttgttttaaggatatacacgttaacgaaaagataatgtacatgatgttgattagtggtcactatgtaaattataatgaaattacctgtattctcaatatgcaataatagcgggaatgtcgattacttaacacaaagcatataactgttcattattaaagaaaaagtaggtgtttaaaagccgtggggaattcaaaaacagatcgcagaattattcgaacgaaaagatttatccgagatgctttgacagaattaatggaagagaaagggtttgaaggcgtaacggtcagggatttgacgaacaaagcggatattaatcgcggaactttttatttacactaccaagacaaatacgatttgcttgaaaaaagcgaaaatgaagtcattcaagaaataaaagaatttatcaaaaaagcaaatcccaatgagattgtgtctgctaatttgaaagaacagcctttgccgtttattattacactttttgaatatattcaagaaaatgcacgttttatgcaggttatgcttggtccaaaaggcaaccctggctttcatcttaaaattaaagaagttatgaaaaccaatatgctcgaaaaattagagctcattgataataaaacgcctccgcttgttccacttgaacatttaatatcttacgtaacgtcagcgcatcttggagttattcagcactggttagaacaaggtatgaagcagtcaccgggagaaatggccctgacactcgctagcatgacttttttgggtcctgcttatgttgcaggcattaaaagaacataaaagaacctgctattctctaagaaaatagcaggttctttttattaaccttctagtaataaagattctggatcttctaatagttctttaacagtagctaggaagcttacggcttctttgccgtcaacgatacggtgatcgtaagaaagtgcaatgtacatcatcggacgattttcgatacgctcttcatcaattgctaccggacgaagctgaactttatgcattcctaaaataccaacttgaggcccgtttaaaattggtgtagacattaatgaaccgaatacgccgccgtttgtaattgtgaaagttccaccttgtaaatcttttaatgctaatttgttgtcgcgcgcttttttcgctaaatcaacgatagatccttcgataccagcgaatgttttgcggtcagcatcacgtacaactggaacaacaagaccgtctggagctgacacagcaataccgatatcatagaatttcttaattaataactcgtttccttgaatttcagcatttaataatggatactttttaagtgctgctactactgcttttgtaaagaatgacataaagccaagtcttacgtcgtgctgttcaaaaaatttgtctttgcgtcgtttgcgaagagccataacagcagtcatgtctacttcgttaaacgttgttagcatagccgctgtttgctgaacttcaacgagacgtttggcaattgtttgacgacgacgtgacatacgttcgcgttcaacaggtttgtcgctattttcacttgccgctggagacggagataccgggttagctggcttacttgcttgtgcctgctgcttttgctcatttgatttttggtctgcatacgaatcaatatcatgtttgcgcacacggccaagaggatcagtagttggcacttgatctagcttaatcccgcgttctcttgctgctttgcgagctgcaggagaagcaattagccattgtttttgatttccttgctgaggcgcttcagctgctggcgctacttcttcaacagttttttgctgagctggagccgcttcttgctttggtgcttcctctgctggtttttcttcagcttttggtgctgctggtgctgaagctccttctttcgcttcaagacgtgcaattgtttcaccaacttgcactgtgtcgccttcgccagcaagaagttccgttaacacaccagagtcttcagctgtaatttcaacgttaactttatctgtttcaagttcaacgatataatcgcctttttcaacgaaatctcctacttgttttagccactgtgcaactgttccttcagaaattgattctgctaattccggtactttaatctctcccatggttcattccccttccttatcgtgtaacaacgtcgttagcaatttcatttttagttaatgcatcttgtaaaatacgttcttgttcttgtctgtgaactgttggatctccttcagctggacttgagcgtcttgtgcggccgatgtagtcaaccgtagctccttctggtgctacttcacgcagtcgatcttctacatagttccatgcgcccatgttttcgggctcttcttgtaaccagacaatctcttttaaatttttatagcgagcaaagatttcagcaattacgcgtcttgggaacggataaatttgttctagacgaaggacgtgtagccaatctttatcatcttctgctttgttcaagcgttccgttaattcactgctgatttttccgctgcacagaacgattcgttcaactgcatcttcttttttgcctaatccaggctgttctactactaagcggaaagagccttttgtaaactcttcaaggtttgacacactaaaagcattacgaagcaaactttttggtgtcataactactagcggtcttacttcttcgcgctgtaaaatggcagcttgtcgtcgaagtaagtggaaatattgcgcagcgcttgttacgtttgcgattgtccagttgttttctccagctagctgtaaataacgttctagacgagcgcttgagtgttctggcccttgaccttcatggccgtgtggcagcaataagaccattccagatttttgtccccacttagcacggcctgcggcaataaactggtcaataataacttgacctgcattggcaaaatcaccgaactgtgcttcccaaagaacaagcgtttcaggagcaaatacattatagccgtattcaaatccaagcacggatccttcagataatggactgttacggatatcaaaggaagcgcttacgttcttcattgcgtgtagtggtgagtaaacatcccctgtcttatgatcatgcagaacaagatgtctatgtgcaaacgtaccgcgttcagagtcctggcctgtaatacgaattggcgtgccgtctcttaaaatcgtagcaaatgcaaatgcttcacccaatgaccaatctacgctttcattttcttcaaacgctttggcacgtttagataagatgcgatcaagttttggaaatacgttaaatccttcaggatatttcaccagctcttgatttacttcaaacagctcttcttttgtaaccgatgtatcaatatctgaaattcctttgaagactgcttgtggcatttccataattctatgttgcttttcagcttttggcggtactttctcataagctgcttttaacttcgcttgtaactcttcattaatttgatctgcttggccgctttgaatcacgttttgttcttcaagctgctttgcatacatagcacgaacggttggacgttttgtcacaatttcatacatcttcggctgcgttacagacggttcatccatttcattgtggccaaatcgacggtatccaattaaatcaatcaagaaatctttgttaaagcgtctgcgatactcataagcaaaataagcagcagctaaacaggcttccggatcatccgcatttacgtgaacaattggaatttcaaaccctttggctaagtcacttgcatatttcgttgaacgagaatcgacgctttctgttgtaaatccaatcatgttgttagcaataatgtggattgttccacctgtttgataaccagtcaattgatttaagttcagcgtttcttgtacaataccttcaccagggaacgcagcatctccgtgaattaaaatcgcgaacgatttttttacatcttgttttgggtatccattcacatcacgctcatcttgagccgctcttgtaaacccttccacaaccggattaacaaactccaagtgactagggttgctagccaatgtcaaacgagctcgaactgtgttttctgctttaatttgtttgtcagcacccaggtgatattttacgtctcccgtccagccgtagttgataccgattgaaccttctgaaggaactaattccttgttaggtgcatgctggaattctgcaaaaatcatttcatacggcttgcctaatacgtgggccaatacatttaagcgtccacgatgagccataccgatattaaccgtttttgggcttgtttccactgagcgtgcaatcagttcatctacaagtggaattaacatatctacgccttcaatagaaaaacgtttttgtccgacaaatgtacggtgtaaaaattgttcaaagccttctacttctgttaaacgctttaatacagaagttcttttctcatttgaaagaggttggaaaatagcacctgactcgaccatatcagtcagccacttattctcttccatgttatgtacgtgatggaattcaaacgcaatggtttttgtgtagacatctgttaaatagttaattgcgtctaaaccatttttgacgtgtgatggcgcattcgtacataaaatatcaaccggaattgatttcaaatcttcttgcgttaaattgtaatcttccaagtgaagcaagacaggatctttcttctcgctttcaagaggtttaattgatgcgtatagatgaccataagcacggatgttttccgctagcttaatagccgatgcaattttagatgtgttagctgaaggtacagcctgtgcgtattcagcttgctgaacctgctcgctttcgtttaatggaggagcaccccaataatcaaataattcttttaactctggatctactagatctgactgctcttcatataactcatactgttctaatacatagccatagttcggacccaaaaatccttgccaaggctcccctctattcgacgtttcgttacccatgataaaacccccaacgagttataataattgtcgtactcaacaatctttccattttgaatgtcgattaccttatcgtctgacatctttacaacgagtgataaatctcactgcgtgtgtatctgatatctgcttatattttaccactcttttactcgtcaatcaaaatgaaatcgctatatttctttaattttttttacttttttaatagtcttactactttttgaaagcgttttataagtaaagctgattaaaggtcgaatcaggtgttaattaattgttattgacctagcttttggcaaaattaaattgcttgaaatatattttatgactattaaaaaaaagaagcagcgttttgcttcttttttaaaactcatctacgattttttcaacgtcttcaaaataaccatcatctacttctgtaagcttgttgcttttcgccgcttcgagtaaatgagtgaaccaagttagttctactttcaaatgcataatcgtgcgcataatgatcgacagatttgcaatggaatgatccacctttttaactcggtacaaattttgcattttttctaaataagctgccgtttcctcaatctttttttctaaagaagaagccactttttcttgatcgacgtaagaagtaaatgaaagcgcagcataaactggtctatgcatatgctctttttttaatagctgttcaaaataaaggcgctcaaattcttctcttcctgcatccgtgatagaataaacggtcttttcaggtctgttcgtctctcgaatcacatcgactactttcaccagctgatttttttcaagcgtatcaaaagcataatataaagagccgcttgccagtttaatatagtgcttcatttgtctttcattaatggtttgctgaatttcataagggtgcttgtttccttccattaataaacccaatatgactaatttaacactcataacacctttcacctcttgatatgcatcttatttagtaaaaaaagcacgaaaatcttcgtgctttttctatttttgagctgcaggttccttagcttctacccgctttttagggggaacttccactcgttcatttcccattaaaaagacagtaatgatagctactgcaattggaataagagcaagcataaatgcatacgtgatcgatgtagacatagcatcaacaatcttatctaatatttgaggcggaatgctgtttcgggcacttgattgaaaaactgcactcggatctcctatttgagaaaatgctccttgtgatccatttcccataccttgaaaattgcgctgcagctcatttgtaaatgtattgctttgaatcgttccaaaaatcgtaactcccagcgtcattcctaaagaacgcgcaaatgagttcgttgagttggcagaacctctaaactgtggatccagcttatgcgttgacgaagttggtaaaagagaaaagctaaatcctacgccaaacccagtcaaaatcatgaataccgttagcatccaacgaggtgtatcaggttccattgttcctaataaaaacattcctactgcaaatgagaaaacggacataaccattaaatttcggaagcttgtttttgtaagaaaaatcccaccgatcgcacttcctgctaccgaccctaacatcattggagttaaaattaaacctgcatttgtagcagaacctccataaacagcttgaacgaaaataggaataaataccgttaaaataataaacgttgctccgtataagaaagcgagaatttgtgatgttgcaaataaacggcgtttgaacatccaaaacgaaataatcggctcttgcgcccgtttttctacaaaaaagaagaatgatagcgccacagcaaagataacgaaaagagataaaatttgtggagaagaccactcatactcttttcctccaagctcaagagcaaacattaaactgactactgaaattacaaaagtggctgcaccagcccagtcaattttttgctttttatgactttttgactctttataaaagcgtacgataaaaaataatgacaaaagtccaatcggcacgttcacataaaacacccagtgccagctgatatattctgtaatgtaggcaccaagaagcgggccaaatacgcttgctgagccaaaaacagcacctagtaatccagtcatcttcccgcgcttttcgggagggaaaatatcaaatacaatggtaaaagcaatcggaagaagcgctcctcctccaatcccttgaatcgcccggtagatacttagctgcacaatgctttgcgctaggccacacaatgcagatccaagtaaaaataccgtcaatccaaaaataaaaaaccgtttacgaccgtacatatcagacagtttaccaaatatcggcatacctgccatcacggcaaccatataggcggatgtaacccaaacaaacttatctaacccacctagatcagaaatgattttccccatagccgtcgctacgatggtattatccatggctgacataaaaataccgagcagcaatcctgctacgataaaacgaatatgtttttccgatgaaaccatttcagttcctcctttcgcatcatctttcttgatgaacagaaatgataactacttaaattattatattcaaatttgagtattttacaatcttaaatgtgctattttttagaaataaacataaaaaaagcgtaatgaactcattacgcttttactgtgagccggggctctaattcaatttcaacatttccttggatggctcttgaaatcatacaggatgtttctgctttttttataagtcgactgattttttcttcttgagccgtaagttcaggtgtgatgataacgtgaggtttgtgaataattttttcgtatgtgaatacaccattcgttacgtccacaacagcttctgattccatcgttaaagcttcctgacggattccgcttctttcgaacatcgccgcaagcgtgataatatagcaagtggctgctgctcctagcagcatttcatctggatttgttcctactcctggcccgtccatttctggcggaatagaaatttgtgtttttaattgtcctgattcaattgtacctacttcatttcgacctcctggccaatttgcttgcaggtgaaaatggtgttttgccatagtttatccttcttccttctatataatgatgtgtacctagcgtaccctttttatgtataaaataaaaatgttctgcttgtaacagcaaaaagactgctaaacagcgcagtctttgttttctcttaacttaaaggtactttcttttcgctttcaacgaaagctttgattaatgatggcaaccagtcctgcagatttgtaaatgaatatccccaaaagctagctttttcattgctcattgtccaagaatgatctactccgtacggagaactattttcgtctgttaaacgagaggttgtttttgctgttttacccgctgcttgttcaatatatgaaaataaatttttgagtgaaatggtaccatttgaacaagcattaatcggcccttttagcttctgctctgcacaccagactaaaaattcaccagcttcttcctgtgaaataaagttcatttccgcttcgatagccggtacaccaatttcttcttcatgcataattttttctacgtgaaaacgtaaacgatccgtataatcatcttttcccattacaattggaaaacggacagccgttaccgaaaacggtgctttttgaaaaaataccgcttcagcttggcgttttccttcttggtaggaaatattttcacggcgtgtatatgaaataggatacttgtatgggtcaaaatcttcttcataacacgttttttctaaagaaccgtatactgaaagagtcgaggtgagtacatagtgactcgtactatgacgaaaagcttcaacagccacagctgcgccgtgtgaagaatagcatatttgatcgaagataacatcccattttcttcctcgtgttgtttcgattacagaatctttttctacacgatcaagaaaaatccgttcaactcggtcgctgaaatcatctggtgttttacctcgcgttgctaacgtaaccttaactcctttagagagcaatgtctggactaaattttttccaaaaaaacgagttccacctaacacaagtgctgttttcatctttttctccacctttcgtatttgatatgagtaaccataccattattatccaacttttttgttcataaagctatgaatctttccgcttatttttttatattcccccctattttttcgccactgccgtgttaagatgtacatatctaacaaaaaggagcgacagtgatgaatccttctccacttccccttaacgaccgccttgttgttcttgatattattcggggtattgctttgctaggcattttcttagtaaatatccctgcttttgcttatccgatatttatttttcaaatgtacgatattccttatgaatataaaggaatcgatgcttatattgatttattcctgctgctgtttgttcaaggaaagttttttacgattttttcttttttatttggacttggatgcggaatctttttgcgtagagctgaagaaaagcattactttgccgctgctttatggtcaagaagaatggcttctttgctattaatcgggctttttcatcttgtctttttctggtatggagacattttgcatgtgtatgctattggcggttttttattgttgtttttttataatcaaaaaaccaagacgattttgctgtgggcaataggcttgctatgctttttttatcttttggcttgcatgcagttttttattccagcccacgtcttgcaggaggctcagttggagtataaggttttacatgaacatgccttagtccaatatttatccacctacaggcaagcagactatttatcttggctgttttatcgtttgaatgttgaagtggtacctatgctattaaatctaccgttttctatctttcccgtattttctatgtttttatttggcttatatactgctaaaaaagaattagtacatagtatcgaacaaaatcgttccttttttaagaaaattcagttaataacaggtgcagcaggttttactttaactatcattctcgctatcttaaaactagaaattttaaaatatggactctatcagcagtcggccattcacctttttacaagtttgagcggcatttttctatgttttttttatcttaccaccttactgttattcctgcaattttctccttacgcttcgatgctgggtctttttaagtatagtggaacaatggcattaacaacttaccttagccaaactttaatttgcctgtggatggttagagactttggtttatacggaactcttaccttaacagaaagcacgattatttctctcattatatatacactccagcttttttttaataagtggtggctttattatttctattacggtccgtgtgaatggttatggcggagctttacataccgatctttcccgcctctcagacggaatagaaaagcttcagcttaacagcaaatcggccttcaaatttgaaagccgatttgtctcctttactgcaaaggaggtacggttattcgtttaattccatttgtctcaaactctcgtatatactccatttctcgatgaaaaatttgcataaaaacttcattttttatttctttaatgggtcctatttgttctatcacatctcgtttagccatgcgataggctagcgcttcccaaaacacttcgttatcgtattctccaataatatcttgaagagaatcttcatgttcttctgtaaacataacctcactgtttagcgtgtgaaaaggtcctttttcaaggaaaggctctgcatgagaaaacatttgtttttctacatccgtatattcttgtgcatgctcatcttccactccagaacatgctgtgaccatccagttacctaaataaattaaatcaagcagttgaaaaaagtgcgtttcagatagttgaagttcaatttcgttttttacaggagcttttgacataagcgcggatctctcctttaattttgagggtagttgctactaaataaaatagctaaaagggttagtatgcaggctagcaagaaaactgaagaaatgacttcacctcttttctgtagtgtaaaaatagaggtactgacatccaaaggagtgaatacgaagggtgtaaacttatcataatcgaaataaagacaagatacaagacttttttactaaattttctgactattttcgtcataaatacctatttttgtttatactagaaaggcccgaaaattgcgtgccaagctgctcaaaataaaaaagcgctgaaccaggcgctttaacggtgtaaaaaaatagataaaccaataaaaaaggcagctaaaataaaatcaaaaatccattgccacttctcacgttttaacaatacatgctctacccctgataacagcgaacttatactaaccaaaacaaaaataaagcttaattggttaaacgaaaatttagtgacaaaatttgatacaagtatgactgctacggtgatgaacagtgccatttgacttataagtacccatttaattctctgtttatatccgtcttttaaagcttgtaataaatcgttgctgatcactctcgctaaacccctttttattcctatcgttaaaagtaagaacgcagcaaaaacgtttctctgcatcttaactacttagcaaaactagctattaaattgaaacataaatatcaacttgactgtactcaggatcaatacagcgttcatcatataattcaaaatctattttataggcacgatgattttttttagcccactcgcgaatataagcccaagcctctacgactacctgtctagctggcccaacagctgttgtaaacaccatgtattcaccttccgggatgatgaactctctcatatcatctttcagttcgccgccgggtaaaacttcatatccgagagcaaatgtaaaatccattttttgatcatattcaaattctgtataaagagcaaatgtattaccatttactttattggcaattttattagctaactgttgtttataaaaagtctgccagtgctctggaataagacctgtgcccgtttcttccacaggttcatctgttcgaataggcactcctacaacagtaaattcatttaccttgactactttttgacttacaactaagtcagtcaacatattgagcccccttaattcttctttttctgtagttacaatgagggaaatacttcttaatatgcattttatttgtattcaaagaaaacgtcaaccttttatacaaatcccttaacgaaggggctgaagatcattcttctaaactataaaaaaacgattctattttctttgtacacatcatacctataagatacccctaatttacaatagagtgaggtaaaaaaatgaagatcattgaacttgccgaattcattaaaacaagtaaaaaaacaactaaacttgctctttcctcttctacagtacagtatacattagaaacagatgatttgaaaattgaattaaaaacaggtggcacgaataagcgaatcgtgttttttcgcatcttcttaaaaggaacatacaaggattggatttgttatcaccggaacgaacatcatatttacgaattgtatcaaaatatttctttatcccctcaactgcaaaggcagcttttgtacgctattgcatcataaaaagagctggcttagttagccagctctttttatttatgctgtagctttgtaaatgaatgtttgtgcggctttacatgtaattttccctttgtccattgaattcctctatataaatagtacgagcaccaaaaaactgctggaacgatgagtacgtaggcaacgacactattcgtaaagaaagaagaatctatagaacgaagcaatcgataggtctcatttaatatacatatatgcactacataaatgccaactgaatttttcccaacttttgaaaaaaatgagtttttgccaagacttggactgctcaatacgaataaaaacaatgatgccgataaaaaaatcgtagaaataaagtagtctccgggcttgctatgctggatattaaccaaccagtaacgttcgacgatctctaacgctgaaaacacaaaaaagctggctaaataaatcattggccttgcgtttaatactgacagaatttgcttaccataaagggcaaacatagctcctaatactgtatagaacaaaccaaagaacagggcatctctcgtttgaaaagaaagtggaaaaaataaagaataagactgcccaaataacccagttacatataatacggtgctgataaacattaataagccaatctttttccatcgttgaaataagaaaacgatgacaacagcccaaattaatgcaatcaagtaccaaagctgaaatccgcttgtgtcacttccataataaaaaatatctttgaatgtgatggatgatgttaaataatcagctactgcatcttttcgttctgctaatgttccgtggttctgaaataagcgcagaactacaccaaacaataaataaaagatgaaccaacatgcataaagctttgaaatattccacgtgtatttttttaagtatgcagaaggctttggatgcttttggattttattcataaacaaataacctgatacaataaagaaaaaaggaaccgcgaatcgtgcaaatgtgtcaacaatgacatctagcacattttcctggttccctaaaaagaaatcgtcatgtgatggattaacatgaatacaaaccacaaacactgtagcaaaaaacttaataaaatcaattgaataattacgttccatcttgttgtcagctccttaaaataaactcgagctctattttagcataattatccaaacaggaaagagtttttggtaaaattaaccttatagtcatggaaaaaatttcttaacttccaatattctagtcttgtttacttgtatgatgtctttcaacattccaaataaatgattctaaagaactacaaaataaaaaaaacagattacgcgtaacctgttttttaaattaacattttccatgcaaacttattatctggtttaatgtcgacttctttttcatgcaaagcctgcacatgttgtttaatctgtttcagaaacagcattacttccccgcttgacacggcagctgagttgagagataacgaatgttttttcgcaatttttaattcctcggtttccactgaaatactcacgtggcgaaataagtgccaagggtagtaaactgttttaaaagattttgagaaataaattcctttagaacaaacggtaatcccttcggttttttgaagaggatatgtatttaaatgagctacaattttttctttagcaggtaagtagagcctgtttcgcatctctttttcaacttcttcacatagctgtccttctaccgacaacacatcttttggatcaggggtttgatgaatttgaaaagatgaacaaatagaagttaattcttttgaggatacacacggatatatatagtcttgacacatatattcatgggaatgagtgcgaataaatttcttgattttttttaatagagatactagctttctagctgagtaatcgttttgattgacttgaaatttctccacgtcattaaaacaaatcatttcttcttttcgaatggtaatggattgaatgttagcgaactcttcccataacatttttccttttttcatccctctgcttttccagtaaatccccttatttgtaaggcaaattccccttttatctaggcctgctataaaagagctgtgtaaatacgcgataattttttcttgaggctgaaactgaaagtatttgctagccatttttttgtagaaactaggtatttgcagtacataaaattgactttctctatagattaagcataagtcagtcaaataattagttttcagcgtcgccacgctctcacttcctttttgagtgtaaataaccgtacccatttttttctattactttaataaacgttttttaatgaaaaaagtttcaactttttttgttttttataaaaaaggtttaaattgaatcatttctttcatctagggggttgcctaattactcacttattcaataatcttattttaaatgttccctacttaattaagaaactaaaccagataatagcaatgcttgcctgctttatccaaatcatcccttgttttttaagctaaataagcttcttttattttttcattatgaattaattccgtcccttttccttgtagaataatttctcccgtttgaatcacatagcctcggtgtgcgatttgcagtgcttgataagcgttttgttcaacgagtaaaatggtcattccgcttttatttaattctataatgatttcaaatatttgttctacaatgataggagcaagccccatagaaggttcatctagcataagcatagtagggttcatcataagcgttcgcccaatggctagtacatggaacaaaaagcatgtcaccctacgaaaacatgctttgcacctatttaacctaaaaaagaggctgggacataacgaaatgaatccaatctaaaggctaacaaatgagatacgtgagctgaactgcttgtgacaccgccattgatttctgcgcaagacttcgctttccgcgggcagtcgcttgcgctcctgtggggtctcgtctgttccgcttttcctacaggagtcttcgcctttctttccaatcagctgctagaaggaacgaaacagatgtatgtttaacataacaaagaaaacgaaccgttaatcaaacatgttgactaacggttcgtttttcactttggctaacatacttttgtccaagcctcttatatgtgaccctttgttttctacttctccccgactttaactattatttcgtaatgcctgtgatccctcttcccctgttcggatcttaatcgcattttttaattcatagataaatattttcccatctccaggctgacctgtatttagtacttttcttgctttatcaacaacgtcagatactggaacttcgcacaccacaatttctactttaattcgtgcgtgcatattgtcttgttttttaacgcctctataaagttccgtaatgcctttttgcaacccgcatcccagcgcatctgtaactgtgataccgctaacgccaattttcgctagttcttgcttaagctcttcaaactttgaagggcgtgtaataatttcaatttttgttaaaacatcactcactgtgcccaccccttttacatattcgattcgtgatacgctctttcaccgtgcagcgtaatatcaagcccaagcgtttcttcttcttgtgtcgcacgcagagatacgattaatccaaccactttaacaataatgaatgtagcaatgccgacaaatagatacgttgctacgatagccaccagctgtttccaaagtagacttggatctccgtagaataaaccattcgcaccggcgtcatttacagaagttgtggcaaataaacctgttgcgatacctccccacgttcccccaataccgtgaagaccaaatgcatctaacgcatcgtcgtaaccgattttctttttaagtgagaagataccccagaaacaaaccgctccgccgataaaaccaattacaatagaagcaaacggtgtaacgaatccacaagctggtgtgatagctacaagtccagcaattgctcccgaaacggctccaagcagcgtaggttttttattgataatccactctactacaagccagccgataattcctgttgctgccgctgtattcgtgttaataaaagccgtcattgcaacgctgttaatagttaaagaacttccaacgttaaaaccaaaccacccgaaccaaatcagcattccgcctaaaagagttaacggtaaattgtgaggtgctgcggcatcggcattttttcgttttccaacaacaagagctagaactaatcctgctacacctgacgaaatgtgaacgacgtttcctccggcaaagtcaatagctcctagttcacgaagccagccgccaactccccaaacccagtgtgcaactggtgcatatacaaataatgaccataggatagcaaataagataaatgctgaaaacttcatgcgctctgcaaaagccccagagataatagctactgttagtacagcaaatgtcagctgaaacatcataaacatattatgcgggatcgtagcactgtagtccccgtttggagtgaacccgactccttttaatcccacccagtccaagttaccaataaaagcattgccaccggtcgaaaaagctaacgaatagcctgctactatccaaagaacggatataacagctaaggaacctacgctatacatcgcggtacttaacatgtttttacttcgaaccatgcccccgtaaaacaatgcaatagctggtgtcataatccaaaccaataatgctgaaaaaaacataaatactgaatcgcccatttgcatgatgatttcccccttaagtacgaataaataacccctgaatctaatgttagattatataacatcttttgttatgtttactatcatatttgatttatatgtatttagcaactactttttgcaaatttattcagaaaacttttgttttttatagtgttttctttttcttatgtattctcctacgtacacataagctgaactattttttattcgtgttatattttctgacataaaaaatcctcttcttggagtagaagaggatttttctttacaaatacatatatacaccaggccccagaggaataccgaatacagcaaaaataagcaacataacaatccaaatccctaaaaaagctagagtataaggaagcataagtgaaataattgtgccaagccctgccttaggctcgtattctttcataaaggctaaaataacaatcatatatggatttaaaggagtgattacattcgtggaagaatccgctattcggtatgccgcttgaataaatccagggttgtagcctaacagcatgaacaatggaataaaaataggtgcttctagtgcccattgagcggagccgctaaaaataagaaggcttagaacaacagttaaaaatacaaaaccaaccacaactggaagtccagttagatttagtgcttttaatgcatccgctccttctactgcaatccacgttccaatattagtccaattaaagtaagcgataaattgagcagccgcaaaaataaggacaatatagctagccatatctttcatcgaatcagtcatataagcgggtacatctctagaacttttgattttccctactgttattccgtaaacagagccaactactacaaaaaacagcagcgtgatcggaatgataccatctaaaaaaggagatggaacaattccaccgtcttcatttcgtagaggagagttgggccaaaataagaaaacagctagtacagcgacataaatacatgtagcaacgatactgttttttaacccttttgcttctgcctcactaatttcaccaaaatcattgcgtttttttcctttataattgcccagcctaggttcgacaatcttttcggtgaccatcgctcctataacggtcaaaacaaatacagaagccgccatgaaataccagtttgctgcaggactgacagcagcgcttgggtcaattgttttagcagcttcagtagaaatgcctgataacaatccgtcggttccggatataataagattcgctgtaaagcctgatcccaccccagcaaatcctgctgctaatccagcaagcgggtgccttcctactgtataaaaaatcattgcggcaagaggaggcacgatgacaaaagcagcatctgccgctaagttggccataattcctgtaaaaatgatggcgtatgtaataagagcttttggagcatttaaaatcgttttctttatggccacttcaagcagacctactttttctgcaagtccgactccaagcatcatagcaagtacaagtcctaggggcttaaattcagtgaaattggtcagcatcgatgttaagatatactgaatgccttcgtgcgacaacaaacttttaattggaagagtcttattagtaccgggatggaccaccgttactccgatactattaatagcaacagatgctactacgataataagcgctagacatacaaacaaaataaaaggatcaggtagtttgtttccgattgcttctactcttcctaatagtttgtctagaaaagttgttggatatgatttttgctctgtctgcaaattaggttgtgccatgctttctctcctttttcgtttagattctttttaggtttttccttttaattaccaaaaagactattagtacataataatctgaatatttatattattcaagtattatttttaaggaatttttatttatctattaaaactaatagcatttagataaatagaaaggcagaagatatctttttaatcgacaatcaaaaataacaaaaagctctccgtttaaggagagctttttgttatttcgctatactagacggagcggactcttttcctgactcattaacagctgttacatagtaacgagcttgagatgcgtcggagtcagcaaagctttttcgctcaaattccgaaacgctgccaatatggacaaatgttccgcctggattctttttataaattcggtagccgataatattaccttctggtaccgcgtaccacgtaagcaaattaccactcatctttacatgtgtaggagtttgtggtgcatttgcttcacgctccaattcttttgcttggtcagcttttagttctgtatagacaactaacctctcttgatgggttccttccgcacggtcaaacgtgcctgtgcacgtaattaaatttaaattacgtttgttgctgtacccaaaaatttcgtttagaggtgccttatctcgcggatagctttttatacgtttaacaacaaaagtaagcgtggttccctgtgcatctctgacggtaatttcatcgtctttttttaagttttttaggttgtaaaagactgcagggccggttttactgtctacgtgtcctgctaatacagcatttccttttacgccaggtttagctcctggttcaaaccaagcaactccattttctgtagatggagctgccatttcaccgctgtctaatattcctacttgttcaattgaagcctccacatgaacagcaggaatggacattttttcaggaatgattcctttaaattctttgtttaactgtttggcttctgttttatgcttttttagtacagcaaattcttcttccagcgttacccggctttttagatcctttgattgtgcttctttttctttttgcttagctgcagcctgttgctttgtttctttggcttctaccatttgttctttaaaatatagtcccccgctaacaagcaggactaaacttaatatacagtaggcgagaacaatcgcttttttcacatcgtcacctcatttcacagctgtttataaaaaagaagggagaacaacctctcttctttttttcaggactcttgacttgtaaaacataaggaaaaggagaaaaaatattatttgcttactggtttcttgcgtaaaatcactccagctgttaacacagctaacgaacctagtgcaatatagatcgctgttagtgggttcatcgttgattcagatgccccgcccatacctgttttcggcatatctgttggcatagctgtttcagcaaacttatcggggttttgttttacgattgcttcacctaaagcttggccaacaccaaacattaatttatacccttcacgatacgtatcataacttccagcgtagtcaccggatgcatattgttcaaatgttttaataaccgtatcttcgtgtgcttttatagctgcctgtgcgtctgcagttggaaggtttccatctgttgctgttcctaagaatgtaccaaattcttgcgcgaatttatggagcttatcttttgcagctttttctcctgcttcatcgccttttacttgtgcacttactaattcagcttgggcattgatgtgatctccttgccaaattttttcgaattgtgcagctccttcatcgccatatactgagccaattgcagctttaaaatctgctgtgttagcattttctaaccagctaacatagtcgtaatcttttgaaccgttaaaccctttttccattcccattgttgctagagcaaaatgttctgctgctaagctgtttaatgaagaacgtaaatctgctgctggtgtatctacttttgtattgtcgaatttatcaggcatttgcgttacaattgcatttgataacgctttactaattgcgaacatttgctgatatccttcgcggtatgtcttcgcggctgcctcatagtcaccttctacataatcttcaaacgtttcttttacttgatcttcgtgcacgcgaagcgcttcttttgctgcatcttcaggtagtttaccttccgtagcagtgcttaaaaattcagcaaattcattcacgaattgatctacttctttatctacttccgccatggcttctttgtcgttttcttttgttgcttttacaaaatcatctgtgtaattgttgtgttctctgaaaattcgttcaaattcagccgctccttgatcaccatagatagaagcaatagctggctccatgtcgacggcattttgatccaatgctttgaacgcagcgtcagcatctttagaaccgtcataggctgttgtcatagcggcaacggcaagcgtaaagtgttcagataataggtagtctaagttcgctcgtagatctgaagcttttgttactgccgttggttttacttcctccgcatttgcaatagtcggcatcaatagtgaagctcctagtacagggatcattaattttttacttaatttcatcattttccactctcctcatttttagttgatgtacgccacttttttcattcttactacatcttaaaccattaaatagattgaacattttgaatattatatatattaaactttcatgttccctcacatttaatgatcctttttaggaagtattctctttctatttactaaacgatcgctgagtgacgttggatcacttttttaaaaaaagtttttaaccgccttttcttaagaagtacttccttttctatttacctaacgaacaccttattcatttggatcactttttgaataaatattttaaatttaaccgaaaaagaaattgagacagaacaagataaattcaatttaaagacgaacaaatgggataaatgagttagtatgaattacttttaataccactgttgatttccgttcaagacttcgctttctgcaggcagccgctgagccttctcgtcgtttgcgccccgcggggtctttcctgcaggagtcttcgcctttccctccaatcaacagctagaaaccactatatatatgaaacctgcgcaataaaaaaatccgaacgagttggattctctatcaagaatttcaattcatcgttcggattttctttcacctaaactacttttgtctgagcctctttttatctttacttatttaaaaaattccacatcacgtcgtttacttcgtgaggcttttcatgctgaggggcatgagatgcttcacctaatcggtgaacagatatgtttggtacatattcttcaataccatctaagttttcaggcataaaagtaggatcttgatttccccaaataatttgtaccgggatgtttaacacttcttcttctaacggaaacaaagattttctttgaaggtcttcttctgtgaaaatctttaagttgcggtaataacttagcatggacagcacagagccattttcccaagagttcacgtatgcttgaacatcatcagctgttagatatcctttttttacgcctgggtcgatcacaagcttacgcaaacctgagaaattatctcgttccatatagtcctgtgcttcttgtttttgaaaccatttcatatattcacttgctttttgctgatttttatttgttctaagctcacgcataaatgtataagggtgcggaccgttaaaagcaattaatttttgtacatattcagggtagcgataagcaaatgtccagccgattcctgctccccagtcgtgtacaactagcgtgcaggagctatatcctaaaccttcaatcacttggcgaatatcttctactaatacatcaatttcgtatgattctagtccgcttggcttttcagatagattatatcctcttaaatccaaagcaactgtgtgaaaatcattagaaaattcatctatctggtgtcgccaaatatgcgagaagtcaggaaacccatgaagaaatagcataagatctccttgtcccttgcttatgtagtgcaaattaacgccatttacgtttatatactgtttactcattgttcatttcctcctttataagtagctgtagagcagtataacgctgcaaaaaatgaacgtcaattcatttgcctcgttcacttctttttagttccttttatgaatatagttaattatttagagtggatctttttgaaggagtgattaacaatggctcatatctattcaaagggctggtttgttcagcagttaaaagcggccaatatctctaaaatcgatggaagaaagctagaaagttataaaacctacattcttcgtaatttacatgctgagcttatagaacaaggtaaaatcaacggctaaaagaggttgagacataacgaaacgaatcccatctcaagatgaacaaattggatatatgagctgaactgtttgagacaccgcagctgattgccgtgcaaggcttcgctttccgcgggcggccgctgagcctcgtcgctttcgctcctgcggggtctcacctgttccgcttttcccgcaggagtcttcgtcaacagctagaaagatttacacacatgaaatctacgtttgtcctaacaaaaaaacgaaccactaatcaaaagtcttgatcaatggttcgttttacatttcgtctaaaatatttttgtcccagcctctttttttacagtgattgctcaataaaagataatacgcgctttacatattcttttttgtatatatgataattttgaacatgttctgctttatcagttttccagaagtgaaaagcatccgggtgcgttttagccattttttcactttcagtgtaaggaatttttgtatctcctgtgctgtgtataaataaaattggtcgagggtaaatatgctcgactgctttaataggactagcttcagcaggatttgcatctgcaataacaggaagaatagcaattgttagcggtgtaaacggaaagtttggtaaatgagaccatacagatagattttcttttaaataagaggttaaatcactaaaaggactgtcggctatcaccgcttttacgtcgtcctcttgagaagctgctaataaagaagtagctgctcccattgaaatgccgtagagcacaattggctcttttgttgtttctttcattttctgaataacgcctaataaatcgagctgttcttttacaccaatcgttgtttgatttccttctgagtctcctgaatctctaaagtcaaacatgactactcgatatcccgcttttacaaattccttactcagcggcagaaagccagctccttgtgcttcacggttatttccgtatccatgtgacataataatggtcgcttttggctgttccgttggttcaatcatccatccttttaaatgggttattccgtctttgctcaaaaatacttgattgctatagtacatgccgtaatcaccaggatttttcacagcaggatttttatctagttttgtcaggcttatgcctacataaagagaaattgccgtacaaagtacaaaacaaagaataacaaaggatatcaggctgatccatattgtttttttcttttttcctgtatttgtctgtcgatttagaactggagtcaagctcgttcctcctttttatctaagatcatctttcctattcttattgctgcttccctttctccattttaaagctagcacatctattttatgaataaaattcgttttattttccacatatttttctggttcaaagcgatagcgatgcgctagttctattttcaacgtttcgtattcttttgctgtatcagggtgagttcgcagataatctcgaaaccatatatgccgattaatttctggatgacctttttcataaatatgaacatggtgcgttctttcatttccgcctttttggaagtatcgtcttccttttatgccgttttcacctttcgcttcgtaaccaagctgctccatcctctgattatatgtatctactttctttatatctttcacttcaataagtaaatcaataatcggttttgcgcttaagccgggaacagcagtgcttccgatatgatgaacctctaaaacttgagctgacattatagttgttaaggtggcagcttcttttgaaaatttcttttcccacgcgatattatagggtgtcagctgaatttctcttacggacttcatctccaattcctcctcttgcaacgaaaaaactgcttattatagaatagcctataataagcagtttttcatcatttaacatgttattaagttttatctagcaaacgcctgcttcgctaaattaacaatcgtcatatcatccattggagggttgtgaagcccagcacgcacgtctctataatagcgctgcagcggattactgcgctgcaagcttctcgcccccacgatgcgcattgctttgtcgacaatcgtacaggcactattggtcactacgtgtttgacagctgctaactctcccgctaatgctgctcggtcgctggtttcatcccatttacttgccacgctgtacataaagtgacgcgcttgcataagttcaagttccatctctcctactaaccgctgcacatttggcaattcgctaatcgttccttcaatactattaggcgaatattctgtagcaaatgcgacagcataatctcttgctgcgatggctgtacccatgtagcaagctggtatatgaagtagccagccgcttggctcattctttttaaaaccaccgaggcgttcaacaagaaagtcgtgtttaatatcgacgttttctagcacaagatcatgacttcctgttccgcgcattgcaatcatatcccatgtttcttctattaaaagtccgcttgtttcacgaggaattaaaaataagccgatctcttcttcaccttcaatgcttgcttttaccaaaaaataatttaacactggagacatcgtggtgaatgtttttcggccattgattcgccagccttcttttgtttttacggctgtcgtttccggttttcctcctcgagtaggacttcccgtcttcggttcagttgcagcggtgttaataagtgcacctttttctatttctttaaaaataaaatcgagcatttgctgattccaaggctgtttttcacgcaagtccattgtaatccccatatgccatccaatactaagagccgtagaagcatctccttgagcaattaattcttgaaataataaaaaatcataaaggcgtaattcatttccgccatatttgctttcgagagaaagacgtgtatagcccgcttcttttaactcttgaatattttcaaagggaaacgtaccttcttcatctattttaaaagctcgtttcttaaatttttcgactagaggcagcaatttttcatacgtagactcttgatttttatttacaaatgaaacactcatttgcttcatctcctttttatatgacagagtgtccctatcggattaatatatagttcttatcatagcatacctcaccttttctgtgcatgtttggtgtatttatctttcttgttgaatctattctttttccaatttaatggtctgttttacctacacattccatacatttaatgaaataaaaagaaaggaatggtgtgaatgaatcaatgtccaaaatgcggggccagtgcaagcacagaccaattattttgcaataactgcggcttttctttcaccgtgtcgccagctgcagccaagcataaaaagagctggtatattggcgggggtattgcgcttatacttcttttaacttttgtattttatttctttttctctggctcagaagaaaagacggctgaccgctttattgaggcattagaatcgaaagatacagctgtgttaagagagttgttagactcttcgcagtctactatagttattaatgacacatctattcaagctctgttagacgcaacttccgatggttctattttacgagatgttgaaaatgatttaaaaaataaatcgagcatctactttacaataaaagaacagaaacattcactactcttcaaaaaacagtacgtggttgtaccgtcatcatattatatctccctcaccacgccagaggatgcaacggttatagtcaatgatacaaaacaatcgatatccaagaatcaaacgcaaaaaatagggccttttatgattggaaattacccgcttacggctttttatgaaagctcttatggaaaacttacagaccaaaccactgtaaattttcaccgacaaaaagaagaaaatatatctgtggtatttaaaggcgcttacgttacaatctcatcgaatagagatgacgctgttttattcgtaaatggaaaaagcacgggactgcaggtgaatagctcatcacaaatagggcctgttgccacggatggaagcgtcactgttcatgcagaagtgcaaaaagacggcacaacgttcaaaagcagtccctacactattcaaagtgaagaaagtattatgttaaatatacaaacgccgcccgtcgaaaaggaaaaaaccgtcataaaagaacgagaagtgatcgtgcctgggccgcgctcttatgctacttcaagctcttatattcttcctggttcggattcttacaaattaagctatagtgatattagcagtttgagctcgagtgaactaaggctagctcgaaatgaaatctatgcgcggcatgggtatgtatttaaatcgaaagatcttcaagcctatttttatgaaaagtcatggtatacgcctgattcatcatttagagattcctacttatcaagtgttgaaaaatacaacgttgattttattaaatcatatgagtaaggtggcctccccttttgcacaggggagttttttaattgaagagagtgcttactccaacgtttttttacataccataatccctatatacgttaataaatttcttatagccttctttattcttttcactgtaaaatataaagtagatgtacataaacttaatacacacataaggagagatggagaatgaatggaattggacgacttccacaaaagcttaatggccatttgattttagaaaatattcaagaaaccatgattattgcggataaagactatcgtgtgcagtggatgaatgcaagagcaattgaaacactccagccagtacttccaatctaccagttatctcatatcgaagagttaattggaaagcatatggacttctttcattccaattctgaagaagcggaaaaattactcacctctcttcatacaacctaccgaacgcgtataacgattggcagtcaatacgtagcagaagccgtgattcaccctattgatacaaaagacggcgagcgttatggctacttgcttatgctattagactttacagatcaagccgaagcagagcttgaaaaagaacggttaattgaggatttgtctacacctttattaaaaatatgggacgaggttttagctgtgcctattaccggtaagatggatatagaacgtggtaagaagctaactgaaacggtattggaggcagttgtaaaagaacaggcgcgctatttgcttattgatttatcttcccttcattcgttagatgaagaacacggttattatattaacacgcttcacgatgctttgcgtttgattggtaccacttgccttattgtgggtctttcttcaaaaatggctctttcgcttgtagattctcagtttaattggcgaacattttccactgtccaacaaagcatctcttacattttagaaaaaaagaattatcgtattgcacccatttcataagcccatcatatcattaagtaatcctctctcaatcgctttttccttcaatcggaaaaggcgattttagttatgaggaattgtgaacgtttaggcacttatcatcataggatacattaatcaaccatagaaaagggtgagagcgaatgccaagtgttattaacatttataatttaaagatcaacagtatctcaagcaacggttctgtcaacattggcgaagcactccataacagtcacacggctcattcaaaatccactggtacgaactcttcttatggcgatgtctcacctgcttcctcgaaaatgcgaaacatttatatcgatcctgatacaaatgaccaaacagatattgcaaacgttgatcatgtcaatggttatcagcagtgatatagggcaatgcttgtcaacagcatgacgacaaacggtgaatacattctctctgaacgcaatagactgttggagtagaatgaataaaaacagtaaggagtctctttatgcctcttcaaattaacgtttttaatatcgtaacaaacggtgtcacgcaaaacgcaaatattgattttggttccaccattcaaaacagtcacacggcgaactcaaagtttaacggcgcgaatttctctttaggtaacttctctcctacttgctctcaaatgaatacgggcgtgttagatcctgatgtaagtgatcaagatcaaattgcaaacccttcagctccaattggaaatcaaatttagctttaacaattttgttagtttacttggcacattacaaggaggtgtgtaaatatgtttccatttggaaagtctccttttaaaggaatgatggaaaatatcccaaaaggaatggcatctaaagacatgaataagtatattcaacaaatgatttcttctacgatgtcccattcttttccggattttatgcaaggaaatgaattctttaagcaagctcaagacatgatgaaagaacagcaggatgtgggaaatgaaggtcaaggacaacagctaagaaggtttgattcaaacgtcatcaatacattagacgaatgcattgttcagttgaaaatccctaatcgcgatattgtatcaagcattaaagtctatcatactccatacgtgtgcacgattgaaggaatagatggagaagaatccttcaaagaagaaattcagcttccttgttcggttcgcaaaaaaggtacgcgcgccgtatatcgttccggagtgttggaaatccggatgcctaaacatgttaatattcctatgtctcaaatagacgtccacgatttagattaaagtggacgtttttttctgttttcatgcatacatataaaatagaaagctgcaaaaggccttgttttatttttttaaagaaggtgacaaatatgaatcacggaaaatttaaaaagtgggcagaaacgttacaagaagaaaaccatacgaaattttgggaaaagatttttgatgatgatcatgaagaaaagaatgatacggaagcagatgcttctcctcagattgtaaatgagtatcgagattatcctttaattgatgtatatgaatgggcaaatcaactgttagttgtaattgaaatacccggtgctaaacgaacagacgtcgaattgactatgcacgaaaatactttacacatatccggttcatctcttttaaccgtgaaggatgcaaatgttcttcacaaagaaagacgtgaaggaacgtttcaacgatcaattatccttccacctgctgtagaggaagcgccgtgtcacgcatcatttaaagatggtcttttgcatgtgaaatttgatttgtaatttattgtgcagaactatacgtagcatgaaaggcagggaatttcatgttttctaagtggtttaaacaatcgcctaaaattgaaacagtccgcaaaataaatccgtcttcccttccaaccaaaaaaaaagtaagtcccatagaccaacgttctaatcaaaagcggaaagaattacccaaaaagatgaaaactaaaaaacagtctaatctaaagaacccttctcagcagccaaagaagttgtctagccaaacggagcctaagacatctgctgaagctgaagtcacaaaacctgctctttcgtcagattcagcgctgaacctgcagggaattattgatcaagtgacgcgtttaaccgacgcgatccctaaaatagaagagcttcatcagcaattacatgaatcagctcaccttattcaatcactgtctcaactgcacgagcaaacagctcatttactctcggctatgcagtcagctcctaatttcgaggctattcaaaatcagctctctgcgttaaaggaagaatcttctaataccgccttatatgagatggtgaaaactcttgacaaaaagattgatgaagtaactcagccaaagcagtccattgttgttgaaaaaatcatggtcgaaaaagtattgttagacaaaattgatcttagtaataatttcggccagctaggcattaaagatttgacgggtcacttaaacatcggcaccacttacagcgctgactctgatcaagtagatgaagaagtcaaagacttgttttctgttaagctaaaagaaaaaaaggttgatgaacatacaactgaaacaacgatgagttcaggaggtgaaccagaaaaatctgatgatcactccgaagaataaaaaatgaccgctactgcttatttaaagcaattgtcggtcatttttgtttccataaatagttgtaattctttttggaggcgttccattaagaactctgaaatttcttcttgattttcttctttatgatgagatgatgctacagcaatacgtcctgttttccctaagaaagcccggtattcaattaccttcatcgctgcatgaagtaagttcgcgtccgaaagcggtgtatttgttagtagaacaatattcatttcattctctttttgtccatgtgtcagcacagtcagccacgagtaacctttatcgtcttttaagcgaacttcatgactggataaagacgcagatttccacgccgcgttagcactgctttgctgttgaacaatttcttgacaccagtctaggcctgtttcatttgaacccagtgaaagagttctcaaaggacgaacaaaggataaacataggttgcccggttccttttgtaactgatataactcatgaaagtccgtctctggatattgatacggcggcacaaaagcaatttgccgcttgttcacagcgggatggtgaaatacatgcaaatcaaccccatatactctttttaacgtagctgcatcctgaaaaatagcatccatccccgtttcttctactcttccatctttcagtaacacagcattatctgcaaacagcgaggcgatgttgagatcatgcaaaatggccagaaccgttaagctcatttcctgctgtaacgtttttagcagctgaagcagttccatcgtatgttttacatctaagtgattcgttggttcatcaagaagtaagtagtcaggttcttgcgccagtgctttagccagtaaaacccgctgtttttctccaccgctcagcgattgaaaagtatgatttctatagtgccaaacatttgttaatttcatcacgctttccaccacttcttcatcctgtgctgatacagtgctaaacaatccttttgcctgataagggtaacgtccaagtgaaacaatttcttgaaccgtaaattctagcccaatttgattttcttgcgtcatgactgcaactttttgcgccagctgttttggtgaataagccttcactgactttccttctaccttcacttcgcctgattgaatggttaatacattcataatcaagcgaataagcgttgttttcccgcttccatttggtcctagtaaagcgacaaaagaacctttgtctacggtgaacgtgatgtcacgaacggtcggctgctgcctatcgtatcctcctgtcacattatatagttcaatcatgatattcctcttttccgcatacgttcttttacaaggagcagggtaaagattggcgaaccaattaaggcggttacgactccaatcggcagttcacgaggttctaatatcgttcgtgccaataaatctgctaaaaccaaataacttcctccaattaaaatagaaagcggcagtacatgcttatgattagctcccgctacgagacgcactacatgggggataactaagccaacaaatccaattgccccagatactgataccgcagcccctgttaatacggatgcacctattaaaatcattctttttttcttctttacgtctattcccataaactgagcggattgatcgccaaatgctaagccgttcagctcttttacatgtaacaacagcataattgtaccaatcaaaaagaacggccctaaaatttgaatatgagaccatcctctcattgatacgcttcccattagccaatataaaacctgtcttacatcttcttcgggagaaagagccacaattaatgaaataagcgcgctcataaaggatgataaaataatccccgctaagatgatggtttcattggccaaattgccgcttgcgagtttcgtaataccaaaaactaaaagaagagtaataaaaccagatacaatgccgactacaggcagcgtgaagatagacaaaccaaaaatactccaatgaaaataaattgccatgacagagccaagggttgcacctgaggaaaccccaatcgtataaggatcagcaagagagtttcttaatagcccttgaaaggcagcccctgctattgaaagcgaagctcctactaaaaatgccaccagtactcttggaaaacgaatttgccaaatgattaaatccatgttttcgggaccgtgatataaggatagcccggtaaggtggccaataataattttgattgtatctcctacggttaacgaaactgtaccaataaatacgcccataattaccgaagtacatacaataaataaactgactatgtataaaatagatactttgttaaaaaaaatacgtttaaaaatcaatacgttcagctcctctaggaaacgaggcgtgatgttttatattacattaaccattcattttcctgtccataaaccatgcttccaccatgcattaagttggaaacaatcatcttttatttgttatgagtgctagactgttgaactaggcaacgtagaatagcgtactaaagttctcggcaaaaaaacaagcgaaagcctctacaagctatactttttgtgtttgctccgggcttttatagttgtctattaactgatacagcttttccatatctacggcttctctcacatatgctgctgcttttgaaaaagattcctctttttgcaggcgactgttgaatgtgtccgtaataggcggcaattttttatgtttacgaatttgattaagcaaagctctgcgcaaagcatcattatgaaacacatcatgaacatacgtgccaatgacgttgtctttaaccgttccttctttttcatgctctaccactgcaaaagcttccgtggtgctcttagaaatcgtctttcccatatgaatttcgtagccttcaatcgaaactctttcactttctagctggacatacccagcaactctttctgtttttttgctggttgtcataaccgtttccactggaagcaagcccagccctttaatggattcaatccgagattctactgcatcagggtctgtaattgtctcccctagcatttgatatcctccgcagatgccaatgacgtgaacgttcgttgtgttcaatacttgattaatggctagatccaggccgctttcttgtaaaaactgcgcatcttcaatcgtatttttgcttcctggtaaaacaattaaatcaggcgtacctaattgcgacggcttggttacaagcctcacgtgacagtcttcttctaagcttaaaggatcgatgtctgtaaaatttgagatgcgcgggtacgagatgaccgcaatatcaatttcttttaacggattcacaagcgttgagtaatttctaagtgataacgaatcttccgcatcaatttccacgttgttcatataaggaataactcctagaaccggaacacccgtgtattcttcaaaccacttcaaacctggttttaaaagttctaaatctcctcggaatttattaattaacaccccgataactctagacttgtgttcatctggaagcaattgaagagtacccactaggctcgcgaaaacgccacctttatcaatatctcctactagcacaacaggcgcttctgctatttttgcaacacgcatatttacgagttcccgatcgttcaaattgacttcggcaggacttccagcgccttcaatcacaattcgatcataatgattggcaagctctttataagcttccgtgataacgttcaaaccttcattaaaaaattcttgccgatactgaaaagcaaacatattacgtagcggttttccgtgaacgacaatttgagattcatgatcacgagttggtttaattaaaatagggttcatattggttgttgcttctactccagccgcttctgcttgaattccttgcgctctgccaatttcttttccatccattgtaatgtatgaattaagcgccatattttgcgatttaaacggtgcagtttgatagccgtcttctttaaaaatacggcaaaatgctgtagcaatcatgctttttccagcgtctgagtgcgttccttgaatcataagcggttttccttttttcacttttcccactccctaccacataaaaaaaccttaactgtaaaagtcaaggtttggtcatgcgctcattaacacattgtcttgacttatttctcccaccgaaaaataaggggtttttaaaagcaggtctcctggcttatgcttcgttttacttctgcacccttcctagtttgactagtgggtctttgcaggttcatccacatttacagtagcgggggctgcaccggatttacaccgatttccctattatcctccttagaggcacttttaaaatcatttattctttattgtaacgaattttataaccattcacaataacgattttcttctattattatatattactgtgtttatacttatttgggtctcgtatgctataataacaattattttccaaacatcttatgaaatagctaggaaggtgctcacagttgaagaaaaaaatgatttatacctttattggttctcttgttctttatatagcaattatatctttttgtatgtatcaaactgctcacaagcctgttccgcaaaacgcagattatgtgctcgttttaggttctaaagtagatggtgacaaaatgtctcctagtttaaaagaacgagtaaagacggctttatcttatttacaagcacatcaacaaacaaaagttatcgtaacgggcggaaaaggatccgatgaagcaatttctgaagcagaggcagcctatcgttttctgcggaaagaaggaattaaagagaatcgaattataaaagaaaatcagtcaacttctacttttgagaattttacttttactaaacagaaagttgatattcaacacaaaaaagtcgtccttgttagcagtgattttcatttatttcgcgcctctattattgctaaacgtcaaggttttgacgtttatcctttaggtgcaaagacaccaaattcaattaaacttcaagcctactttcgtgagtatgctgctatattaaaaacgtggctgtttgataagtaaatagagtacaccccctatacaagcgaaaaacacggcatgaattcatgccgtgtttttttattaatcatctgtatcgataactgcttttggtaaacctgtgtatttcgcccagtagaaaataccaagtgaaacaagagcaattaaaattaagtcaagcgggttgcttagcacaccttgtcctccaccaaatgaacctagataagagataacaagcataataatataataagcaactagccaccaagcagatttaagctgctgtgcaaattttacaacgtcagttggtacgtatttcttaaacgctacgtagataacaaccattagaagctgtgatcctagcagccaagaaattgtcgtccaccctgaccaatatacgatgtatgaacagaaaataaatgatacaggagcaataacgctcatgccttttaatttaaaaggttttttaagatcttttgcatttactctgaatgcagcagctgaaattggcgcaatcgcataagacagaataagtgccactgaacatacgtttactagcgcttcccaagaaggaaatggcagtgtccagaatacggacattccaaatgatagccatagtgacgcacgtggaattcctgttttcttatctacttttgagaaacgtttaaataatgttccattacgagaccaagcataaactaaacgagaagttgtattcatgaagatgttcccgttaccgcctggtgataaaatagcatcaaaaataacaagcgttactaaccagccaaggcctaaaataagtgcaatatctttaaatggtaaagagaattgctcttgaattgttccccatcctcctgatagcatatcagccgggatgttaccaatgaacaatacttgcagtgctgtgtaaataatcgctgaaagtacaatacagataatgagcgcgattggaatattacgctgcgggtttttaacttcactggctacagaaacaatagggtgaagtcctaggtaagcaaacataacgccacctgttgaaatggctgcttggataccattaaaaccaaacggagcaaaatcgccagttgtaaagttagctgatttaaagtgataagccaacacgacgataattgtaagaggaaccgcatatttgaacacagatataataacatttgacttagcaaatgcttttacacttacgtagttaatgataaaaaatagcgttaataacgcgaactgaaataaccagccgactgtagtaggcgattcagaaccatgtttagttagaccaggaagccaaaaagcaacatactgacgtacagccgttacctcgatagcaatcaaactagtgtaagcaataatggtaatgaatgaaattaagtaacccactaaatgaccgtgtgagtaaaccggataacggataattccaccggtacgcggcagcgctgctccaagttcagcatacactaaaccgataagtaaaataatgactccgccaatcagccacgaaaaacttccggctggcccagcctttgacgctacgttactaaccgcaaataaccaggcggaaccaaaaatagctcccatcccaattaacgttaggtcaagtaacgatattgattttttaaattttccttgatttccttgatcagacataaaatcctcctttaaaattcccactccacatatctacgcccttgcgtccgatatgggattctttacatcatcctcctcttactaagacctcacaagtggatatgttaacaaatattctctaaaaaaccaagttaaaaactttatttttttgtaaaacatcgttgaattgcttatgtatagcgcataaattccacagaagatttgaggactactcctcctatttaaccgcatttttcttaggttaaacataaaagaatattcaaactatttatcaaaaaaagaggctgagacataacgaaatcaaccgctagaagcagctactacatacgcaaaacctacgcttgccataccaatgaaaaaatccgaacgatgaatcgttcggattttgcttcaactaaaataattttgtccgtacctcttattttgcttatttaaatacttttacacgttcagttagcggttgaaattctttttctcccgcaggtgacacaggattaccaaatggcatttgggcaattaatttccatgagcttggaatattccaagctgcttttacttcatcgtcaatcaatggattgtaatgctgtaatgttgctcctaggccttcgagctcaagcgctgtccaaatcacatgctgcagcatgcctgatgattggttagaccaaaccgggaaattttcgctgtaagatgcgaactgcttttgcaatccttcaactacttcttgatcttcaaagaaaagaactgttccatagccgcttccgaataagttcattttttgatccgtatctgaaaaattttcagctggaacaattttacgaagcgtttctctcgtaatatcccatactttatcatgctgttcgccaaataaaacgactacgcgtgcgctttgggaattaaatgctgaaggagtatgtttcaccgcaaagttaataacttcttcaattttttcttctgatatttttacatttttatcaattgcataaatagaacgtcggtttttaatcgcttcataaaaatcttttccaacctgttgttgatcacttgatttatcaaataatttatctaaaaaacccattttccacactcctaattgtttgtttttcaagcttaaattgcatgtttatacccttccccctgataaaaggagataaacaagatataatgaattcttatatctctaattcgagatattaaactaaaaaaatattaattgaaatttaattactttatgtaacttactttacaatgattattttgttctgtcaagcaaaaatgattatctttttcttttcttgattatatgaaaaaagactgctaaatacggcagtcttttttcttagatgcttaatgttcataaatcatctttcgcgtcattcccccgtctactacgaggttagctcctgttacaaaatcattttcgacgtttgttaagtacatacacgctcttgagatatcggctggcgttcccacccgattagacggatgctgcgcatgatcgatttcacgaaggccatcgtagtcagatgtctcaatccatcctggagaaatagcgtttactgtgatattgtcatcaccaagtgaaatggcaagtgcgtgagttaaagcaacgattcctccttttgtagcagcataggcttctgtgtgaggttcagacattgtagctcttgtagaagctaagtttacaatggagcctccgctttcgttttttctcatcaccttagctgcttcgcgagagcatagaaacacgctgcgcaggttcgtattgataatgtcatcccattcatcaatggttagctcatacggtgatttccagcgggaaacgcctgcattattaatcaaaatatgtatcgtttcatacgtactgaccgttttttcaacgagatttaaaatgtcgccttcttttcggacgtctgttttgacaaaaatggcttctccgccttgtctttgaatagcttctgcgtgacgctctccttcggtttcgtccacatctgccaataccacttttgctccttgtttcgcgtatgcgcgggatacatctttacctattccgttcgcagctccggtaacaacaacaactaaatctttaaacgacatatcatctcctccttatacgctttattcacttttttcttcgtctttaaacaagtgatccgtgacgaaaagagcaaacgtttcagccgttaacttgcatccagaagcttttgggtgacctcctcctccaaggtgcccaacaatttctgctaagttgatttcgtcttttactgcacggaagccaatcttttggcgtcccatgtccaccataacggaaaagtcgatatcttcgttttctagacacagtgcatttcctagctcagactgatatgtatctgcgaatacaatccctgcgttgtacgctgtgttatcaatttcaaccctttcttttatgatttgtttttgcttgtcgtaaatgtatttttcaatctttttttcttctgcttctagtaaaatttcatgtttgtccgtaaacgtaaattcttgattttcagtatggtacgattcacgaagcgtttctagaatagtttctttaaattcttcatgcgggattagataatataggtgattaaggcgctttgctttcaagttattttcatggaaccagtcccacgtatcaaataagcgcacaagttctacgtactcatcaagcaacgccgttttttggagcatgttgttgcgtactaagtagtcgtagaaaagagatgtagctgccgtctttttaccgttttcgtcttctgcaataacatgaacccaatcgtatttctcagctagtggaagagcagagatatgatggtcaataagagtgattttttggcctttttttaccagttcatttaatttttccgctacttcctcattcacgctaatatccgttatgtataaagctgtgtctccatcgttttcttcttcaataaaatgtgtcactgtgtcattgatgcggccaatgcttaccgtgctgtaatcaaagttgtcatcgccaaacgctaaccgacccaatagtgccggacttaccccgtctaaatcgttatgtgaaattaattttatttttttcattaatcaaaactcctttattttcagtcgccttagtatatgtaccggcttgtatattatagcaatttcagcataaaaatgctgttatttactttgaagtgaagtcaacgttcagacttagacttgcctgtatcaaaggagatgagacataactatctcgattcaatcaacagctagaagcaactacacccacgaaacctacgctcaccgataccaatgaaaaaatccgaacgaatgtgattctttatcaagaatctcgattcatcgttcggattttcttttaaataacctacttttgttctaacctctttcctcttattctaaattgctgtgctgcttaaacgcctgttcatgattcatgtgattcaaattcccgtattctaaacaaatggtatcaaatacaacgtgagcacattgatcaaataacgagcccaaaggctgaatggaagctgcttcattttcacttcgatatttggttgcagcgggaatgtgcagcagctcatcagtatgagcagttaatggtgattctgtactagctgaaatgccgataactgaacatcctacctctttcgctttttttgctacactcaccacttgctgtgtttttcctgaaccagatacagccaccaacacgtcacctgctgcaatcgaaggagtaatggtctcccctacaacatatactgtcgcacctaaatgcatcagtctcatcgcaaacgatttgcccattaacccagagcggccttcgcctataacaaaaatccgttttgcttggtaaagtgaaaacgctacttcttctatttgcggttcttttatgtgattcattacggccgtaatttcgtctaaaatcgtttgtgtttttgtcattatacgttccccctgctcataaataagttttgaaattcagcagatgcttttgccacatccgcactttttgtaatcgctgatccaataatcgcgacgtccgccttcatttgaagtaatgatgctgctgaggttggattaattcctcctgctactgctatttgggcatctgaatgaaaatattgccgcaaatttatttgactcagcgattttccttctttttcttgctcgtctttgctgatatgatggcaaaaaatagcgtttctataaatacccacttgcttttgcgagctgcttgacgtgtttaataaatcaaccatcatttttttattccatttttcgctgacatttgcgcaagtatctatcgtaggtaaaggtgatacacccatgactgttgctatatctgcacctgcttgatagcacattgtaaactcatactctgcgttatcaatcgttttgatatctgctacaatcgtcttgtgcggaaatgcctgtttgattttataaatgctttcaattccatactcttttataagagatgtacctacttcaatccaatcaacagagggttctgccagcttggcaaggataatagcttcttcaattgtgacacgatctaatgctaattgtatcttcatattttttctcctcactttttactaaaccggtttagtaactgcgtaaaaaaaaccaatattttgatgagctaaaaagagcacgccataggcgctctttttagtttaatgcgacaaagttgtttctcgaataattaattcacactcatactggtactcttcataagctatcttttcttttaaaatttgtttaataagtaaatctgctgcttttgttcccatatcaaaagcgggctgcgaaatcgtcgtaacagcaggcgttgctacatctgcgtaaggaatattatcataaacaattaaagataaatcatttgggatattaaatccgtgttgtttaataaatttctgcacttcaatgaatactaaatcgtttccagcaagcagcgctgtgggcggattatcggctgcaaatagcttctcaagcgctttttgcatgtccgcttttttgcagttgataatcatgaattcatttacaggcatattggctgatgttaacgcttctttgtacccttctacacgttcaatccggggtgtaatagttaatggttctgtaataatcgctatatgcttatgtcccagctcgaggagatgcaaaatagcctgttttgtggcttcttggttgttcgccactacggatggaatttttccttttacatcgtgaattttgcgatccataataacaactggatattcttctttgatcatctgctcataaagagaggtattggctcccgttggaaataaaataaggccatctacttgctttgcttttaacatattaatatatttcttttctttatcagggtcatcatctgcgttacagatgatggcatgtatatcttgtgaatggcaatagtcttcaattgcacgaatgacttcagtagaaaatctgtgcataatattcgcgacaataatcccaatcattgacgttcgcttttgttttaagcttcgtgctagatagttgggctgatagccgagtgtatcaatcgcttctttaattttctttcgtgtttcttcgcccatatattcataccgtttgttaatgtattgtgatacggtgcttttggagacatttgctgcttttgcaacgtccagcatagtaactttttgcatcataatccgcccttttcattcaatccctaaaattatgctactcctagtgtaaacgaaaaaaacgaaaaaggaaaagccttcttgctagcagaaggctttatttattaagcgtacgcaagcctagcttcttgaatttcattagtaaaacgcttcgcttcctttgttacttgacgtaagtattcaggagttggaagctgctttccatccactaatgtgcttcctgccccaatagcagctgctccagctttaatataagcgcccgcattttcagccgtaacgccgcccgttggcattaatggaatatgaggaagcggccctgctatatttttaaaataagctgggcctactacgcttgccgggaaaactttaatcatatctgcaccgcattcataggctgttagtatttcagttggtgtaaaagcacccggaacgctaatgacaccgtatcttttagccgttttaattgttcgttcattaaccgtaggagaaaaaataaatgacgctcccgccataatagcaattcgtgctgtttcttcgtctagaacagttcctgctccaataaacatcgagtcgtcaaattcattttttagttctttaataacctctacagcagcagggttttccattgtaatttctaggtttgttactccgccttcttttaatgcgtaggcaagcggaataattcgctcagcacttgctcctcgaatgaccgctacaataccgctacttgtaattttctcaatatgcatctcaattctccttttttatcgttacattaagccgttgtttcgactggctttacactttgaacttctcttggctttttcgttgcgacaatggttaaaactgccgcaaggaataatgatccagccataaagatataggaagcgccaaatcctcctgttgatccatttaaaaatcctacaatataagaaccggcaaatgaaccaagtgcgcccatgctattaattaaagccattgctcctccggcaacattacgcggtaaaatttcaggaataattgcaaagaacggtccgtacggagcgtacatcgttcctccggcgataacgagtaaagtaaaagaaagccagaagttgcttgtgccaactaaataagatccgtaaaaagcaaacgctcctactaataagaacggccatacaaatgcgcttcgttttaaaaacttatctgacagatatgaaaccgttaacattaatataactgctaatacgtaaggaacggacgctaaccaacctgttttcactatactcatgttaggcgctgctttaataatagacggaagccacataacaaatccgtagacaccgatactccataaagcatattgaatgcttaataaaatgacagtacgatttttgaaagcttctttatagcctttaacaggtttgattccttcttgttccttttgcagcgcatcgtgtaaatctgctttttcttttttcgacagccatcctgcatcttttggctcgtcatttactagtttccaccataaaaatgcccaaataacagctggaaaaccttctaaaataaacatccatctccagccaaacgattctagcaaatacccagaaacaatagacatccaaagaacggttgccgggtttcctaaaattaaaaacgtgttggctctagaacgttctgcttttgtaaaccagtggcttaaaaataccagcatagcaggcataacggcactttcaactactcctaaagcaaatcgaataacaaacaaaaatccgacgtggcttaccatacccgtagctgtagcaagtgctccccataaaatcagagaccaaaaaatcagctttttggcgcttttattttcagcatagtgagcgcctggaatttggaaaaagaaataacctaagaaaaagagcgaccctaataaagacgaaatacctggcgtaatatgaagatcttctgccagccctgccgctgctccaaacccatagtttgcacggtctaaatatgcaaggctatacgtaataaatacgataggaattaatcgaagccatcttttttttgctagctgctgtttcattatcacttcactccttgtttttgggattccatatatctttgcaactgctgttcagttggatatccgtcgttatctccagggctttgtacagctaatgccccaatagcatttgctctccttacagactgagtaagagaatcattttgaagaagtccgcttaatagtcctactgcaaaaccgtctcctgctccgactgtatccactatttgtttcacttttattccttcaaccatcccttgctctttagccgtcttaaaaaaggctccttgttcacctagtttaataaccacaagctctacacctgcatctaaatagtaagaagcaatgtcttctggattttcgtagccggttaagatttttccttcttcaatgcccggcagaacgtagtttgcttgtttagcagcttcattgattgtaacaaccatttcttcttgcgatttccaaagagtgggtctcaggtttgggtcaaaggaaaccgttcttccagctgctttcatcgatgtaagtgcatgtagagcaaaatcgcgcatacttgctgacacagcaagcggtatgcctgtcatatgcatatgttttgccgctaaaaaatagttttgattaagatcgctcgagtgcaagtgactggctgctgaattttttcggaagtaacaaacttccggatctcccacttccacttttgatttaatttgaaagcctgttgcatgttcgctgtctactagtacacaatcggtgttgacatattcctcttgtagacgtttcataataaacgtaccgaaaggatcgttgccgactttgctcacccagcctgcgcgcagaccgagacgagcgagaccaattgctacatttgtttctgctccggccagttctttcgtataatgcttaatctcatgcagcggtcccggctgttctgccatgaacatcgccattgcttctccgaaggtaataacgtctaatgaattcattgaacttcctcctgttctgctgcttgcaccgatgaaatgaagccgggaatttgttccggttcatcgattggaaactctaaagctttaaaaatcgaatgagaaaaccctttcaaaatatctttccacatttcatttgaatcgtttgatatagcggttgtcactagctttccactgctttttatgacgtgtttaatatgaatatagcccacaaatgaccttagcattttgattgcttcctggggttgttcatgtacataaagccaattaccaatatcaaacgtcatggaaacaggaacttcgtaagcgttatcaaaaaatgcatgcagagatgctatgttgcctccgtgactggtttgatcgttctctacaaatagacgtaaagctggaaatgcttctaatagctgctgtaaatctgccataggcgattggggctgataaaaaccaagagaaacttttacccactgagcgccaagtgatacggcttcttcaagaatagcttttaattcttgtgtgtttaactctccattttctttccacagttcaattggagccgaatatactgtaaaaagcggatatgtttttaattcttcggcaataagctcaatctcttgatctacttttttcattaactctcttcgaatttccactccatgtacttgctgctcatatattttcccaatcatggtgtgctgaaagcctgttgtttcgaatgcatttaacgggataatgatactattcataaatcgacctacctttcttattatactaactaaccacttactaaaccggtttagtaaatcgatttatctaaattataagactattgaaagcgcttttcaagctttttttataaattataaaaaaaagaaacaacacagctttatgccgtgttgtttcttagtgatcatctgtgctttttactagattgcgatcttgctggtaaatatcataaatcaaaaagctaaagccatagtacaagaccatgatgacaactgacttcgtcatgataaataaagcgcctagcccaataccaactaacagcgtctggacacttaaacggtcacgctggaaagctagctgtgataggaaataaccaataccaattaagacggccaatacccatgggctctttctcacttttggtgaaggtgctttatagatgatatagtgaaataaaaaggagcgaatctcaacatgcctttttcttctttcactaatatagaatgcttacgagttatacaagaagatcaacaagtgatgagctgttgaaaaaacgagtgctcataccattattataggtagagttgtttttctgaaaaaataatgcatgtctttgacatatagcgacgtttaccttcaccaaaagtgagaaagagcctacccatgtgttttcaatggctaatatatagtgactatataaataaaagctaggaaaataaacggtactttctacgaagctggagataccgctgtatgcaagccaccacttttgctctctttccgttttaggaacggttgcctcaattgacgtgggcatttcctgttccacaaaaaccgtttctccatgatctttcatccattgaagcataatggaaagaatgataaagcctgcaaagattaaaagcagcaaatattcaatccacgctggatacggagccgtgcggtgaatcgtatcgagatatactccctgtaatcctaacatagaaattggaaccctatggtataccatcaccgcaatataaaatagtaaaattagcacataaaaaaagaactgttctttgtagtagcgaatttttttgccttctgaagcaattcgcttaacagtcacgctttccaagtacggacggataatgcttatgataataataagacacgtaaatacaatcatatagttatgtaatcaccttttcaacttcgttatgtaacatattttttcattttttccatccgtaataacagtaggttaacagcctctgcactttcttatagtaccaaaaaactaaactttttgacaatcctgatttatcaattaggatgatgaaataagcatagctacattgatgccgctaatcgtgaccataggagaccctcctccagggtgagtcgttcctcctacaaaatataagtttttaacatcttttgagacgttgcttgggcgaagaaaactatccattttccggtttgaactcacgccgtacagagcacctttaaatgcaccaaacgtttgttcaatttcatatggagtaacaattcgttcatgtacaagccaaggctcgatatctaaatcaaactgagaaagcttgcgatagacaacttctctataagctttcatttcttcttgattctcttctttcacagcaggagcattcactaaaataaataaattatcgcccggagctaccgttttatcggtatatgaagaattacaaatgtaaatggtgggatcggttggaagcgttttttgttgaaatagttcatagaattcctgtttataatcctgagaaaaatacacttgatgatgaatcagctgagaaaagcgcttcttaacagctgccatgatcacataagctgatatggaaggctcgaattcagctgcttttttgtttttaaaatgaggtctatcctgttcttttacaagtgccggataggcttttagcaagtccccgttcacaataacgatatccgcgtctatcttttcttctccatttacttccactccgacagcccgtttattttttacgattatttcagtaacactgcagtttgtatacagctttcctcctgctttttggaacacatgtcccagcccttttgcaattctagcatttcctccttttacatagtacaccccatcattcatttctaaatgtccaatcaatgaaaacgtagcgggtgatgtataaggtgaagatccgatataggttgcatatcgattaaatgcatttcgtatattttcgtttcgaaaaaaacgctgatgaaacgtatctactgtttcaaacggtcttacttgcagcaatgcttttaataaagaagggtttgtgtaatctttccacgatgaaaatgtccggtagaaaaattggctttttgcaatgtcgtatattctttttacttctttcaaataggcagggtattgctctgcagcaaagggatcgagacgttcaagctgctgaatcatttttctttcatctatagacatggaaaattgggagccgtcggtgaagaaattattcgtatgatgcgttagtttgacaagaggcatatagtcttctggacgttcacccgcttgctcaaataaccactgaaaaacttcgggcattgtaatggtattaggcccaaaatcaaaagaatattctcctagctgcacaggcatcatttttccgcctacatgctcgtttttttccacaattgtgacatcgaacccctttgtttgaagaagaactcctgcagctaatccgcctaatcctgccccaactattagtacttttttcattgataatgccttcctttccattcatatccctgcttttttcgttcacgcttcatggaatgattcatcagcagcatcagcacaattgccgacgcgggcatcgtacaaaataaaagccctttttgctgagccgaccggtcaattaaaaaccgctgaaaaagcataatgcaaaaaggaagaatccaaagcatgttgcctgtgaatattcctgctataaaaaaaggaagcggcagcacatagtaacaggcaaaataaacgcttagtacccaaactgctttagcggagcggcccagacctacaaagatgtttttagcaaaaccgttccatacttcttctgttgtttcatacatataacagctaacatgagaggtaatattagctaaaatgacgcggtgtttcttttgcttaaaaagctgggctaggtggacatcttctactagtgaagatttgacggcttcatgtcctcctacggcctcgtaagcttctttttttataaacataaaagcaccgtgagccgcggaagctttgctcatcttgttacgattagctacgacaaccggtaaataactaaaaacaaccacatgctgaagcggaacaaccaatgcttctaaccacgtttttacgggaaaacgagggaaacctgttaaaagagcggcttttgccgcttgtgctgtggctaaagtatgttctagtgtacgttcttttagttctacatctgcgtctataaacaataaatattctccatttgcagcttgcgacagctggtaacaggcatgaacttttccgacccaaccctctctcagctcttttccttctatgatggtaaacctcggatccccgtgaatttctttcaacagctgtgttcgtgtttgatctgtggactgatcgtctagtatgacacattctagattgctgtacgttaatcctttaatagaggaaatgattcgctttacatttcgttcttcatttcgcattggaatcaaaatagaaatgagaggctgaggtgttttggaatccggctcgtatctttttaatttaggcattgcttgaatatttacaatggttaaaagcagcataaaaataaataaaagcatatagtaaatcattctttcaccttcgctttccaccacgttaaccattcactaagcgtcttttttccttttaataaaaccgtaaactcctcatcgttttcttgaattattttctgtttttgataatcaagctgagcagtgactgcaccgcctagcatgttggttatctcttctcttgccttggccgagtcgtaaaaaacagcttgccctatccagataaaaagctccggtcgctgatcatggcgaaacgtataataatacgtaatgggaataacttcaacgtcagaatgcttctttagaagaaaagcaggtccttcagaaaaagttaacggtcttttttcaagatgctcttcttttccttggggaaaaataagcaccgcttttttctcttctaacagcttactggcaaaccttaacgattccaccgtatgcttcggagacgctgcatttactgaaaaagctccgattcgttgaaaaaaaggaaaatccttcattccttgttcggacatcatagcgtatagatctgtttttaataccgcgttatttaaataaaatgtcactaaaccgtcccaccagctggaatgattagcaattaataaaatttttttatcttttgggagccctcctatatgtaaatgaatacgataaaattgctttttaagctgatatgtgacaaacagttgaaaaaatcgctcaaatattgagtttttcttcgggtaaatcataagcgagtctcctttttatacacaatataaagaataagaaaaggaatcatcgtcagccatacgacaagccataggccatttgccaacgctacaatcacaaacatcatgacaactgcactatacaaaaataccattcttttttcccacaccggattttcctctttaggagacttagctaaaaagaagtatacgaccagctgaatgaagaaagacaataaaaaccagccggagaaatttgataaaggaatattataataaaagctgtccccttcccacacccaatattgtttaacaacataggcaacaggatcaatagccaaatccataataacagcaaaaagcgaactaatgactgcataggcaattccatggacaataaacggcagctccatacgtttcataattcctagagctagtattctgcttgtaaccacaaccataaaccaagccgaaccaatggtcagaggaacacctaaaattttggcgccaaaatctttttcgtaatcgtaggatccaaataaaaatccatacttaacacctagactttcgatataaatagatgcgcctgtcacaaatatcgcaacgagcagtgcccgccttactccataagctttagctagataaataagagcaagaagactgctcaagtgtaaaaagaccgcgtttgcccattctaaccatgaaggcagcaaatcgaaggaaagcaagacgactccgcatacgtaccagataagaaaaaaacgataaataccatttgtgatcatcctctatccaccttctcaccagcttctttttgtcaaagtgctattatataagctcgtacccattctctccattttcaatgtgctcttttttatgagtagtccgcgctctcttaaaattatgtaaaaacagccactgttagtacgttccctaaataagagactttattacttatttataaacaaaaataaaataaacgtccattaaaatctacggatgtatagattgtaatgacgtttattttttcttatgtatatacacttctaatagctttttgacaatgagtccgacaacaagtccaggtataacagacagcataggaagccaaattggtcctataaaaacaccgttgatggttgttactgaggaatacataatgcctactgtaacaaaataagcacaggagacaaaaggaataaatgtaaatctcgatgcgccgttttctgcttctttaacagcatcccaaattgcaaaaaaatataaacatggataaaacattaaccactgtatgttcattacttctagggactgccttgtttctcctaaaaagcttaagcggatgccttcattaaaatttgcgcccatattaatgagaaattcaagtacaataaacaaaattccttttatatgttttttgtttagtaattgtccaaagcccggcaacgcaatgctccataaaagagcttctagtctagtcacgttctgtcctaacattttgacgtataaaagaactccacagcataatatcagtagaaattttgtccatagttatcaacctcacaataatttactcatagtttttgtaaatgtaaaatttttatactacatcttctttaatatttgtaacttattgtaaattgataaatagtttagctattcgaccagatattttcgtttagaattttctgtttattaaaacaaaatcgtacggtatactagtgttatacgtacgaaaggatgagaaagctgacatggaaacaagttttttttcaattttaatactagggtttcttttaggaatcaagcatgctctagaaccagatcatattatcgctgtatcaaccattgcttcaaaaagtaaaaaactgtggcgctcttcgcttgcaggagtgtactgggggattggccatacgcttacgctgtttatttttggcatgattttaatggtgttaaaaagcagtatttctgaacgtatgagcatgtcacttgaatttttagtgggcattatgctcgtttacctcggtttcacatcgtttctgtcttacaaaaaacaagtacatacgcatcacgaaaaaacgtcttacttaaagtcattgggcattggctttgttcatggactggccggaagcgcagcgatggttgtattaacgattagcaccgttactcacgtatggcaaggtgctctgtacattatcatttttggaatcggcacttgtcttggcatgctgttatttaccacggtcattggaattccattcgttacaactaaaaaacaagtgacgttaaaccgctgcttactgcaggtaacaggcgctgtcagcattatatttggcctttattatatgtataatttaggtgtaagcgacggattgtttagcctgtggttctaaaagcgaatgagacacaacgaaaacaattcaatctaaagatgaataagtaggataaatgacctggactgcctgttccacagctgttgatttttgtgcaagacgccgctttgccctttaatcaacgggtagaaggagctacatacaggaaacctacgttcaccctaccaataaaaaaatccgaacgaatttgattctccattaagaatccagctcgttcggatcttctttcaactaacatatttttgtcccagcctctttaatacttacgcaaaagtgatacttcagcttttagtaaatgctgtcggaacaatccgtatactttagcgattatgtcttcaacttcttgtgtactagcagctaatattcgaatagcacatccagggatcggaagtgcagaagctcctactttacagcctgcctcttcgcacagctgatgtactttcgctgtaaatgcgtcgtcggcgtttggatgaacaatgataatcgatccaaaatgagtatacccttccattttcatcatgccgcgcaaatggctttctggcttcaagtataagtgatcgtataccttcagctgctcgtttacatacagtttaagcttggaacgcatagaggtatattgaaacagctgcccatccggcgaccaccccggggtgatgctgtcacacataaacaaagcagcgttttgtgccatacgaaccgttatttcttggacaaatgcagcattttcatacaaaataagcgggtctggtatatattccatgattgcttgttcttcaagggttatacacgtttcttgtaaaacagctttgttcggtgttttgtacacctttgtcgcagattgagtagtagccgtcagctgggcatttttctctaccgttatcatcgttttatacttgtctccgcttacgtatcctccgcctacgtgaagcatataaacaaaaggggattcaggagtcatgtaaataggtctggcaactttgaaagcaccgtaatggtacgtatctttaataacggttcgctcactgtttctttctgctcgaagctctaaataacccgtgtagctcatgattcaaggccgattaaaaaggcctcttttttaatccattctatcacttggtcgagccctttatcttcttttaaattggtgaaaacaaaaggcttgtgccctcttgcttggattgtatctttttccattacttctaaactggctcctacatacggggctaaatctgttttgttgataatgaataaatcagatttaatcattccttgaccgcctttacgcgggattttttccccttgtgctacgtcgatgatataaatcgaaaaatcaacgagctctgggctaaacgttgcggctaaattatctcctccgctttctacaaaaataagttcaacatcggggtggcgttccactaactcatcgatcgcagcaaagttcatagatgcatcttctcgaatggccgtatgaggacatcctcctgtttctactcctacgatacgattttctggcaaaatactgttttttactagaaattgcgcatcttcttttgtgtaaatatcgtttgtaacgactgccatgcttagctgtccttctagtgcacgcgttaatcgttctactaacattgttttccctgcaccaacaggtccaccaattccaattttaattgcattcatttttacgccttcattgttagaaggctttccctccttttttatgacatgaacaatcgaacatgcaactgttcatgctgcatttgagcaatttctaaccctggtgtcaccgcaccaaattcctcttgatctgcttgtaaaatatgctgaagtgcttgctgcagcagcggctgaaaaagaacgagcgttttttgcccatcggtttgcccgatcggtatgccgcgaacagcattttgaattaacgaagaaatactagcgtacaagtgacttaaaattgcctcttcttttgtaatgtttaactgcaggctggctaatgcaaatacaacagcaggatgtccatacgccttctttgcttttacttcactcatatacttttctaaataagagccttgaaataactctaagcaaagttttaacatgcgctggcccacgcgtctcgtcccttctcttgtttcttttgacaaagcaagagcgtataattcatgatccactcttataatttcgttaaactggtcatgatttgcatactcataagccagtctgcatgctaagccgtccgtatacgtcagctgaacatcaaggtatgtacgaagcgcttcttgaaaggtttctgtgttgtaaatttgatctcgctgaatatacgtttcaaagccaaacgaatgtgaaaatgcaccggatggaaaatttgaatcacatagttgaatcagcgaaagcaatgaattagtcatgactgtgtccgatatgcttaaaagcttgttttacttttcttttttcgcgcttatagggaatatcaagctgctgaagcaattcttcgactaaataatcgtactgtacgagcatgtctccaccttcaaactgtgctggcaaatgtcggttgccaagctgatgagcaatttctcccatttgctgaatatcaatcggctgaatcgttaaaatatcgtctgccaccacctgaacaacaatcatattgcttttatccataaacagcacgtcgccatcagtgagctcgcgattttcttttagacgaattcctagttccttaccgtgatctgttacaacgcgctgaacgcgttttactaagtgatcactttcgatatataccgtttctatatgcggagcccgtttttctaatgttgccatatttccgataattttttcgattaccatttctttcacctcaaaataaaaagtatcgctgtgccataggcacaacttctgctgcttcacatgtaatcatttgtccatctacttttacttcgtacgtttggggatcaacttcaattttaggcatttccccgtttaacttcatatctgttttttttaattgacgaatatttttgaccggtttaagcagcttttgcaaccccagtttctcgcccactttgttctcgtacgctgcttttgacacaaacgtaagagacgttttagctcttgcttttccataagaagcaaacatcggacggtataaaaccggctgtggagttggaattgacgcgttaggatctcccattaagctgtgtgcaatcaaaccgccttttacaatcaagtcaggctttattccaaaaaaagctggctcccataggactaagtcagccattttccctgtttctactgatcctacgtattcggaaattccatgagcaatagctgggttaatcgtatatttagctacatagcgtttgacacgtgcgttatcgccagcttcgctgtcaccatcaagtttccctcgctgctttttcattttgtcagctgtttgccacgttcttgtaatcacttctcctacacgtcccattgcttgggaatctgaagaaatcatgctgaatacacctaaatcgtgtaaaatatcttcagctgcaatggtttctttgcgaatgcgagaatcagcaaaagcgatgtcttctggtacagagggatcaagatgatgacataccatgagcatatctaaatgttcttcaagcgtgttgacagtatagggtcttgttggattagttgatgatggaagcacgtttggaaagcttgccatttccataatatcaggtgcatgtccgcctccagctccttcagtatgataggtatgaatgactcgatcgccaatcgctgcaatcgtatcttcgacaaagccgccttcatttaaagtatctgtatgaatcgcaatttgaacatcgtactcgtctgctacctgtaagcttgtgtcaatggcagatgccgtggttccccagtcttcatgaagctttagtccaatcgctccagcttcaatttgctcaattaaaggctctttggcacttgcattcccttttcctaaaaagccaatattcattgggaatgcttcagcagcttcaagcattcgttcaatatgccaagctccgggtgtacaagttgtagcttttgttcctgtagccggtcccgttcctcctccaatcattgttgtaactcccgaggcaagagcagtttcaatttgctgcggacaaatgaaatgaatatgtgcatcaataccgccggcggttacaattttcccttcagctgcaatcacttctgtactggcaccaatgatgatgtctacttcattcatcagcaggggattgcccgcttttccgatagtttgaatgagtccatcttttattccaatatctgctttatatatgcctgtataatcaacaataattgcatttgtcaacactaagtccgctgcttcgcttcgtgttgcaagaggatgctgccccattccgtcacgaatgacttttcctccgccgaactttacttcatctccgtacgtggtgaaatctttttcaatttcaataaatagctctgtgtctgctaaacgaacagcatctccaacggttggtccaaacatatctgcatactgacgtcgcgacatttgaaaactcatcttatacatcttcctttctatcagaaagcgatctgtttgttttattgttaagaccgtagatttctcttgttccggagaaagcaacgagatccacttcttttgcatcacctggttcaaaacgaacggctgtaccggccggaatatttaaatgatagccaagcgaagcttcgcgggggaactcaagcgcagcattcacttcaaaaaaatgaaagtgtgaccctacttgaacaggtcgatcgcctctgttgattacagtcacgctaattgatttctttccgttattgcatgtgattgggtctttttttaagaaatattcccctggaatcatatctttccctcctcttaacgaattggatcgtgcacagtgacgagcttggttccgtctggaaaggtagcttccacttgaatatcatgaatcatttccggaataccttccattacatcttctcgttttaaaatcttggtcccttctcgcattagctgtgctaccgtcttgccatcacgagctccttccataatttcatatgtaataatagctactgcttcgggataattaagttttaatcctcttgtttgacggcgtcttgctaagtctgcagctacgacaatcattaatttttcttgttctctcgacgtaagtttcaatgaaagcttcctttctgctaatctattttctaattaacatcaaatgtgatattttctaacacaaaatacataactaattatagtaaattttctgacaaaaaacaaagaatttatctcttccgctaaaaaaagatgagcatgtttgctcaccttttactcttctgaaatcgcttgtgttttccatttctgcaggtgtttccagcccaaaccttcagctagctgacgttttgcatagtctactcctttttcaatagaagcttcatagccaaatagataatagcgcaagccagcgtttaatactacttgattatagacgtaagtcagttcggaagaagattccccctccagaatgcgcgtcacatattccacttgtttttcaacacttattttcttttcaaagtgctcttcttccacaaacagtccgtattcttttggattgacaataaacgactccatctctccttctgagatcgtaaaaacaaagctgcttctatgtacaggtacatcttctgatccttctatcccttgtaccacgtatacgtgtttgaaaggcagagaagcaaaaataggcacaatcttattaatggctgtacggtgaaaagcgcccatcattaaagaagaagcattcgataagtttagtagtttttcaaccgtattaataagtgtccttacaccaatttcatgacgaacttgtttgatgcggctaagaggataagagattgtttcggcatttacaaagccaatttttaacgtttcaaacgcatgaccgatgtcttcaatcgtttgagcttgagggatctgtaatgaatgaagtacgtcttcaatcgttgttccaaactttggaggaagtgcttctgtacagtgtaaaaaagctggcacacctctttcagctaataaaattgatacaggaatggtcgcaaaaaatgaattcctccctgcataagggcttgcaaaatcaattgatttatcttttaaaggctgagacagcggtatttcttttgttttttcacgaaaagcatggacgaatcccaatagttcatctgcattttcagttttaatacgttccgcgataaaaaaagcagcgatctgagcatccgtagcttgtccagaagcgattaagcgagctgcttcttttgcttgttcatacgttaagtcagttgatcccctttttccgcgcgctatttctttgataaattgctgcatatcgtacacttcctttttaactgaatatttgtacattgtatcacatattttctttgttccttagattatcttctatcaagtacgcaaactgctaaaaaatatgaaattaaaggaaaagtactagttcttttataacctaatatagtataatctatctgctatactattatttggatatttgggggactttacaaatgaaaaaagagaaactacttgtaccatttatagcagcatctgttttagtaggagcatcggtgacaacgcctgtttttagtcactctgcttatgctgcttcttctgtcagcgtttatcaaaaagacgttaattcgctagcagattattacgcaccattttataaaaccgtagaaaaaaagctaaaagaaattgaaggaataaaagatgacgaaaaagcgttagatgcatatgatcagcttgcgaatcaaattgaccagtttctaacaaagactgataaaaattatgcgatgaatcaccttaattcagaagctgatcagcttcaagggtatttatacgacagcttaattgctctttacaattacattgtagatcttgaagactatgcgtatggagatgtaagtgacgcggaatttaataagatctctgcaaattttgaaaaagaaatcaacgcatacaatacgcaatttcagcaaaaagcgaagagctataaaacgaagcgaaaagtagcgtttaacgcaaatatgagttatttgcttgatgaagatattcaaccttcaccaacagctccatctacaccggctgatagcaatggcacctacacggtgaaaaaaggagacacgctgacagcagtcgctaaaaagtacggcatgacggtagctgaattaaaaaaattaaacaatttaaaaacagacgcgctaaaagtcggacaagtgctgaaagtgaaaagtgcaagcgcaccttcgccggctccagcacctcaaacttctgttagtgcaaaacagcagcaaattgtatcgtatgctaaaacgctaattggaaagccatataaatatggaggtacgacaccaaaaggttttgatgtatcagggtacacacagtatgtatataaaaacgcgggttcaaatatttctattccccgtacagtagcagatcagtataaaagcggtacggacgtaaagcaaaacagcctgcaggctggagatttagttttctttaaaaacggcaaatccgtttcagtcgtaggaatttacctagacaaacaagaattcatttatgtcagcagcaaaggcgttaaaacgcaatcactttcaacagcgtactggaaaaacagctatgcgggcgcaaagcgtattataaagtaaaaagaggtgccataaggcacctcttttgctttactagctatgtatttctatactagactagcaattttataaagaacttcttagttcataaccgtaattttaacagattttcttccgaactgttgagcatcaccttcagcaggaacgaatacatcaattcgattgcctttaattgctccacctgtatcggcagctacagcttcaccatagccttctacataaactttcgaacctaatggaataacactagggtcaacagcgattactttttgatttggatttgcttttaaatccactcctgtagcagtcgtaccgctacatccagcacaattagccgtataggcagttgcttcaactgtcattgatttgccgctggcttgttgtgacgattcagcaggttgttgttctttttgagcttgttcagcttgagcttgctgctgctctttttgagcttgttcagcttgagcctgctgctgctctttttgagcttgttcaacttgagcttgctgctgttcttcttgagtttgttcaacttgagcttgctgctgttcttcttgagtttgttcagccggcgcttgagcttgctgagcttctggagcagcttgggctactgaaggacttgattgctgagcttggccgtttggagactgaatttttaattgttcgccaggataaattaaatctgacttcagtccgttccattctttaatttgatctaccgtcacgccgtattgctgactgatagaccataaggtgtttccttgctgaactttgtgcgtcatttcttttatagtagctacgtttaattcttgatttggataaataatattagatgttaagttgtttgcatcttttagctcgtctacgctcacgctgtgcttttgagcgactttccataacgtatcacctttttctacgtgatacgttccgcttgtagaagcagaagctgcacctacaaatcctgctgaaaggattgctgttgttcctagagtaaatataaattttttcattacgaatacctccttatttactcaatgattgaatgatatcatcctcacatttcacagccgttacagagccatgctacttttattacaaaacttaacaaaacagaacattcaatcgtaatatttctgataatttggctatatgatgaaacgtttctactttttactgctttttattgttgtttttactaaaatagttaaatttctctaccattgctgactatgcctcttcttttttattgatcatttaacgggtatattcagtttttttataacaaaaaaagcgaaccgctaatcaaaaattttgattagcggttcgcttttcaattcggctaaaatacttttgtcccagctttttttatttcttattaaatccttgcttttcaacaaattctttcatatacatacgcttaggattggaaagcatgtcggccatttgaccagtccatgtgtcttggcgtttgccatttgttctttcgttgtaataagcagaaatttcttcgttatacgctgttaattcttttttcgtctgctcatcgttcggctcatatgtttcttcatgatacacatgtttaaatggtaagcgcggctttttatccgtaatacccgctgggtgtccaaccgttagaccaaataacggaattacatgataaggcagttttaacaatttgcttacttcttctaattcgttacgcaaaccgccgatgtaacaagctccaagtcccattgattcagcagcaagcgttgcattttgcgcagcaagagcaacgtcaataatagctaccataaactgctctgtgctttcgagcgctgtcgataagtcttttttctccatttccgcaatgacatcatgacgatgaaagtcagcgcaaaatacaaagaagtgtccatttgtttctacgtaaggctgatttcctgctaattgagcaagctttcgcttcgtttctttatcttttactccaataatggaatacgcttgaatatagcttgatgtggaagctgcctgtgcgctttctacaatcgtctgaatttgctcttctgacaatggtttgtcttcatatttgcgaatagaacgatgatttaaaatcgtttcaataactgagttcatattataatctccttttacttcatctaaccttctacagttgttatctctacagttagtttatcgaatgtaaaaagaaataaccaatgttctgcttaaaattgattttgacttgtctcatatcgatacagcttaaagtgatctgcaagcacgtgatctacttttacttctaagctgtctacatattcgtccatccgttttatcaaccggtttcgtttcacatcattttctaaaatgttcttaagctgctgttcaaaggcttcagcctcattaagcggtatcagcagctctttttcttttagatattcaatgttaatttgttcttgaccgggaagagaggagtgaataaaaataggtagtcttttgtgaagggcttcgctaattgtcactccccccgcttttgtgacaatggcatctgctccctcatataaatcattcattttctctctcgattttacatacgagaccgctttaattctcgggtggtttaattttattagttcttgatacaactttttgttttttccgcacagcacataatacatatacgtacagttttgcggaagctgctgaagcattttgcgtacatttccaaggccggaattccctccggcaatcaatatatgtttctgtggcataagatggtcaatccttctttttaaaaacgctttatgaacaggaattcccgttacataaatagaagactcttttacaccgtgaacgttttgtaaaaacgcttttgtatcctgatcaggcacgcagtgaagctcaattccatttttaccccatacgtcgcttactaagaagtctgtgtatacgtttataataggaagatcaatgattcctttttcttttaacccgcttaatacacaggaaggaaagctgtgtgtacaaacaatgacatccggctgctctgcatcaattaatttcttcatatggtattcgataatcggccactttttcacaacaaaatcgtccatcgtatggtcgttttttttgtatacatgaccgtaataaaatttttcaaactgctttgggaaaacagaaatccatttcatgtatatcgatgaaatcatttgttcaagcggtttgctccaatagcttaaacaatcaattttttgacaaataacgtgggaaaaacgctccataatggcatccataacggcgtctgctacttggtgatgaccagatggcatctgaaaaagcggtaagaataaaaccttcctcattgaccatccctcctctcaagacgttttcggtttcttgttctttttataagtaaataaatgacaaaaaaagctacagcgcccatgatgatatacgaaatatgaattcgatctcctacgtagtaacctagaatcagaaaagaaaggacccatactagacttcctactaccgataacaataaataaaggaaaaacggatagcgacttattcccgccatatatgggctaatttgacgcaagcctggaatatataaaccaaataaaatggtccatatcccatatttatggtagctgccgcttgccgcttcaattttctctttggttaaccctacgtattttccgtatttatcaaaaaatggggttcccgcatatcttcctagcccgtaagcagtaagcattccagtgataacacctaaaaaagcaaaaagagatgattcgtataagttcagctgatgtttggcaataaacatgcctaataatattaaaaatgattcttcaggcgctggaattccaacaatcccacaaaaaagtacaagtaaaataacaatataaccataggaatgtatatactgagaaataattgttaagtccactgctcgctcctctatttacgattgattcatcaattgctgcatggttatactttcatacccttgctgttttaagtaaggtaaaaattcttctaacgccgcaatcgtcatttcaggtgctttttcatctgctcccggggtatctccattatcgtgtaacacaaaaatggctccatcttctactttacgcattagtttttgaactaatgccgttttcgttgtttttagtgtccaatcctgaaagattcctgtccagatcacaaggtgatatggcttggccattgataaactgctcatatttaaatgtccccacggcggacgataaaaaagcggcttttgattggttactttctctataacctgtgcacattgatgaatttgtctttttaattgccaaggtgtttgcgtccatgcactcacatgacggtgatgatgtatagctacttcatgcccttcatcaatcattctgtttaaaatagacgggtgtttctcccctagttctcccacaataaaaaaagtagctttcatttcatgcagtttgaacaagtccaaaatttttggtgtataaacaggatgaggtccgtcatcaaatgttatagctattttatgcttttttgccccttttattatgactgatgaatgatagcgacggtaaagggtttgcgaaataatggtatatacacatataaccattagaacgaaaagtaaaacaataaaaaaacgagtcatatgcttttaaccatccttttgaatttaaatcctgcatttattataacggtttactcagactttggtttcattttttgtgatagaagccaggaattttaaaataatttgatactttacctaaaaatagctattctgcaaggatataccggaaataaaatgatatcataaaatttcccttcattcagtaaaaaaagtactttttaccatttatatctatcttttgtacgataactttcattattttttaaaaataaaaaacttcccgcacgaatgcggaaagtttttaaattaaaattttgctcgataccatttttcagctgcttcaatttctgttcgtgttaactgatggccaaatgattcccaatgcacctgtacgtccgctccagctttttctaaaagcgcagaaagttcttccgtttctgatgctgggcaaatagggtcgtttttgcctgcgccaataaagatagaagcgtcggtcttaggcacttcaattcctcttcttggaaccatcggatgaagaagagctgccccttttaaagaattctcataatgaaatagcaaacttcctgcaatattggcaccatttgagtagcctacagctacgatgttgtgtcgatcgaatgagtatgtttcagccgcttcatctaaaaattgatgaagttcttttgtgcgttcaattaaatcttctatatcaaatattccttcttgtaaacgtctaaagaaacgaggcattccgttttctagtacatttcctcttacagataataccgagcaagaggaatcaatcatatccgcaacaggaagcagatcttgttctgtacctcctgtaccatgcaacagcaataaagtcggtttcgtctcgtccgttccttttttaaaaatatgtttcacgtatatccactccttttaaatatctcgaattaaagataattttattataagaactttcgaagcatttgtaaaggaactactgtcaaagaaatacctgtatgttttgctggcagtatcacataatactgaataacttcatatggccattgctcatatgcagctaggtatttaattcgtttgacttacagcggggaaagaaatattccacttttagctaagtgctcccgtcaaaaggtggataatgattaaaactcgcccgtccttcttcgtataaaaagtgccctagtctgataaattagttaattttttctttatttcgttactttcaacagatatcagcatttatacccgaacgtactaaatcttatttcgtatacgtgttacaacaacttttttctatgagaaacagaacgtaaaatatcagcttgttttttcataaaggggaacaaagccccgaatggtgctttatacgactttatttgacaaacacaaatttatgggtaaactaagttcagatgattgtatttcactttgtttcagtttaataaaaaacgaagcatctgcgagtaagcaaaaaataactgcgtaaagagctatttatgtcaatcatcttataccctaaaaacttacctgcacttgaataatagcctttattaaacttagcgcgtcagcttgtgaacgttaatactttatcacccatttctctgttgaaagattaaatgggtcaacaaacttcagcattctttacataacgaccttgtaaagacgaagaatgtagctatgtgtgaacatggaattattacttagtggagtgaaccaacatgaggaaatttattttagcctttttagtcgttgttttaattgtaatgctgggagttacctatgtattaaagcaatttcagcaaacggctgatttatcttactcgaaactgcagtcggttcaaagtacggtagtctatgacaaaaatgaccgtaagattgacgaattgtataaaaccgttccccgtcaaaatgtttcgagcaatgaaattcccgattatgtaaaaatggcgtttgttgcaacggaagaccgtcgcttttacaagcattttgggattgatttacaaggtattggccgcgccctttttaagaacattgtaacaatgagtaaagctgaaggcgcaagtaccattacacagcagctagcaagaaatctttacttatctagtgataagaccattaaacgtaaagtagatgaaatgtttctatcacttggcttagaaagacaatttacaaaagatcaaattttggaattatatttaaatcaaatttatttcggaagcggtgtatatggtattggtgcagcttctcagctttattttaataagcctgtatcagatttaaccgtaggcgaagctgcgcttttagcgggactgccaaaagcgccgagtacgtattcaccaagcaatagtacagaaaaagcgacagcccgacgaaacgttgtattgaaactgatgcatgaccaaaacgttattagcgatactcagtatcagcaagcgttaaacgaacgtgtagtcaagcctagtgttcctgttaaaaaaccgaactccaatcaagcatttattgattatgtaattaaagaagctgctcaacaatatggcgtatctgctgatgacctttataagggtggttatgccatttatacagatttagatcctaatttacaggaatcgattaataactctgtagcaaatcatacgttccgagatgatgacatcaacagcaaagtagaggttggaatttcagctgttaaccctaaaacaggtgggatctcagcgatgtatggaggacgcagctatgagcgaaacggcttaaaccgtgctacaagcggctatcagcttggttcagctattaagccgttagccgtatacggtccagccttagaaactggagattatacaccaacttcactcttaagtgacgaacgacaagactttggcggtggatatagccctaaaaatgcagaaggtgaatatcaaaagcatgtgacaatgcgtgaagcacttactcgttcacttaacgttccagctgtttggcttttaaaacaaattggtattgatacaagcgcaaaattcatggaaaaagctggacttcctcttgaagatgatgataagtcaaaattagggcttgctcttggaggaacgaccacaacgttctctccccttcagttagcacaaggatatactacttttgctaacaaaggcgtcatgactaagccgtacgcaattcgaaaaattgagatgcgcgacggtgaagtgaaaaagccagacattcagacagagcaagtaatgagtgaagaaaatgcagatacaatgacatccatgctgcaagatgtgattgaaaaaagctatggaacaggtgttaacgctcgttcttcacgagatgctgcaggtaaaaccggtacaaccaacgatgtcaaagatgcttggtttgtcgggtataccgatgatgcagtcgtttctatccacgctggctttgataatgctaattctacgcaaacaacgaaatacttatcaggcggcggtggacaagaccctgctacactgtttagctcaattatgaataactggtaaccaaaaaacctccaacttcactgttggaggtttttttaggataaatgcgttttatgcttaagtgaaaaaaaggaaacattaatgactttgcaaatcgttacataatgcagaacggtcaggacaaccacgccacagttcatcccgataataattccctgcatgccaatatttgtttgtgatcctaagaaaaacatcagggaaaaagatacaatatgagaccaaatcgtatgataaaaagcatcttttacatagccaaggccaattaaataagcttgaagcgggacggcaaaaaagtgaaaaagaaaatacggccataaagcctttaggtagtacacggcttctgtagaatgaaaaaacaagttagtaagcggctcagcaaagaaatacatcgccactatagacggaatcccatataaaaatgtcatttgcatactttgagtcaaaagtctttgaagctgttcttcctgatttttcgcatgagcttcagatacagcaggtattagtgctactaaaagagaatgagcaaagaaagccggaaaaaagccgatcgacatcgctacccctgttagcataccaaaatgctgcgttgccccggttaaagtcatgcccgataaaacgagcgcgtgtttgattaaaaacggctgaatagcattacataccgcattaaataaacgcagtcccgtggtcggaagtgagacgcctaacagctttttccgaatctcacttggagaaagcagaggtctgtgccctcttgataaaacacttaactgggtaacatacgtgataaaaaaataaagcaaaataacagcttcggtcccaattagcgtacaaatcgcaataaacagcgacattttaacatctgtgaaagcaaacatttgaaacacaataaataaaatcgttagctgaaaggctttgcggataaaattagacacagcgatagtcgtcatattatttttacccgtaaaatatccacgaagcaccgctgaaaacgaaacaaccggaatgaaacataggacaacccattttaagtaaggatgatagtgactaaaaaatggaaaggctgctaatactgctagtgtaataaaaaagattcccaagctcacagcagtagcaaaaatggtggcatgcttcatcatatgctgatgttctttgcgatgatgttcagcaagaaatttagaaatagaaataggcagttctaagttggctacggtggcaataagaaaaatgataggaagaacagtcatgtacatgcccatgccttcccttcctaattctctagcaagtaccatatttacaagaaattcaattaactctcctgcaaaggcagcacctgctagaataaacgttcctttcaaaaaagtgttcatctcgttatctcctctatctcccgtcctttttcatcactacctcttctctctatgtatatgacaagcccaatacgaattatttgtctaattgtattttttcggtgtacaagttcttgtataatgttcaacctatgtgaaaaaaaaccgttatataccttttttacataggaaattcattcatttcttatactttggctcttgaaacttacatagaaaaacaggagactgagtgaacctgccgattgctaatgggaatagagcatgttgttttaatgtaacaaatccacatattagttaagcgtctttattcactattttctgtggatgcacttctttttttgacaccgaagcgtttttgcctagtacaaccgaaaaaacaacaattattgctgtagcaagagtaaaaagtgtaatcgtttcacctagaaatagagctgcaaacagaatcattaaaaatggctgtaaatattgaacttggctaactctggctattccacccatagccatcccgctgtaccaagcaacgtatgctaaaaattgactcactactgagagataaatcaaactaacccatgcttgtaaaggcgcatggagcatttcagctgtaatgcttagtcccactggaaccataaaaaaaggtgcaccgatgataatggcccaagcaattacttgccagctgcctaattctcttgctaacacccctccttctgcatagctcagtccaagtatcagcaccgctgctagtaaagctgcatcagcaaactgcagttgaccgaatccaaggtgaagagcatacacgataacggctgccgaaccaatcatacttgatatccagaattttaaagaagggcgttcaccccctctaaacatcgcaaaaccggctgtggctaatggtaaaagagcgatttcaaccgctccgtgagaaacaggcaaggatttcattgcccaagaagtgagcagaggaaaccctaaaactgcgcctaaagcgacgatcagcagacttttaaattggcggagagaaggaaatttttcttttcgtacaatcaatatcacagctactaaaacagcagctacagctgttcttcctaaaccggcgactgtcgttccgaaatactcgactgcaatgcttgtagaaggaagggttaagctaaaacagataacgcctactaatcccaacaatacacccattttctctctaatttctttttgcatcttaccctacccctgtctttttatttttcagaactgtaccatttttctaaaaaaagttctgatataattaaaaggatagcgcaggacaactactaaaataaatcattcttttacctatctgtacgggtacaaattaaaggagtatgacctatgagtttaaaatatctgaaaatcatggaagaaattaagcttggcctagcaaatggatggcttattgcaggtggtaaactcccttctgttcgccgactctcccaacttttttcgtgcagcaagaataccgttctcaaagcgtacagtgaactagaaaaagagcatttaatttattctgttcctaaaagcggctactacgttgtggcagaatttcaacataggacgaatgaaaatgaagtgattgatttcttgtctgctggtccagataaaaacgttatgccttatcttgaatttcagcattgtataaaccaagcgattgaacactacaaagaagagctttttacatactctgatcaacaaggctcttactcattgagggtacagttagtgaaacacttgcagaacctacaggtgttcactcaagctgaaaggttagttgttgtatccgggtctcagcaagctcttcacttactaggttctatgccctttccaaatggaaaaaataatatcctaattgaacagcccacttatttcggttttatcgagtctcttacggtgcaccaagctactacttttgggatccagctatcgatggaagggattgatcttgatcgtttggagtacatttttcgaaataatgatataaaatttttctacattattccaagatttcacaatcctcttgggcattgttatacaaattttgagaagaaaaaaatcgtggagctagccgaaaaatacgatgtatatatagtggaagatgactttttgggcgaccttgatcccgatgcaaaatcagatcctttattttcttttaatccttgtggacgagttatttacattaaaagcttttcgaaagtctttcttcctgggttacgtattgctgctgtcgtgcttccttcgttaatgaatagcaactttttacgatataaattcagttcagattttaatagttcagcgctttcccaaggtgctcttgaaatttatttaaaaagcggcatgtttacgagtcatcttaaaaagataaaagaggtataccataccaaaatgcaaactcttgtagaagcatgtgattcactgctacccgctcatacacatttttctaaaccaacttcaggattctatttatccattagtttgcctgagcatgtgacagcaaaacagattgttcacatgctaaacgagcagcacatatatgttgatgatgcctctagattttttttaccagaatataaaagagacactcttctccgattaagcatctcacaagtaaatacgaatacgatcaaacgaggaattgaacagctggctcagtgcattactttaattgatgatagaaaacatcatcctattccaaataaccttttccccttgtagaatgggaattcaatggacatactaaacgaaaagaagccaaggaattagaatccttgactttttttatttaatcgtaacggttataagaggcatgttatgcgtcccttttgcagaaacatgtgattgcacggtatatgtgccaggctcagagaaagatgtttgtatttcatatacaccttctcctatttgtttaggctttaacatcttccctttcccttcgctatcttttttttctatttcaaattcaatcatttcaacatcatcatttttcactttttcgtctccatatgtaacttcggctttgtagataccactttcatttttctgtaaagtctctgggccttgaagatttacgtccaacggttttggctgctcagcatttgtggtttgagcaggttcctgaccacaggccgttaaaagtaaacaaagactgattatagatatacttattctttttttcatatattcatctcctttttaaaccctttgtttaactataacgcgtattgccaagaaaaaaatgaatttttctaaaaaagaaggacttttaaagaatttttaagaaaaaaagttcatactgatactaactagttttttccaaggaggaagaaaatgaattcagctaaatctccagctaaaaaatcatggctacagacattaatcaaaaataaaaatgagcgcaaaaaagtgatctttatctttactatctcttttttactagttgtagcagggcttatttacatccctatttataaacattcccttccactcgattctaaaatatatgaagggaattttaaagagcttggttcaatcgcacgaattggtttttttgcagctttagccatttatcctatttttttattattaaaatggaaaccgttatcgcacataaaaaaaggaaattttgagttaaaaccgcttatccaatttttagccaagtatgttcgtcagtggcacgttcccattgctcttatatcaacggccatgattattttacatggttatatggctttaataaaaggatttcaagcaaattttacgtacttttcaggaattattacgatggctgttctagcttgtttactcgtgatgggcgtgaagcgctataagcgtacagataaaaagtggcatcttaaatttgctatctcttttttggttttgtttatgattcacgctaccttttcataacttaccattgtttaaagtttttttatatagggtacagttcacaatgaatacatgatatgtatcactatacgttttacatcatttaggaggtataaacatggcaagagtgttagctgtattatcaagcggatacgaagagaaagattatcacacaggttggtgggcagaagaattatttgctccgctgcaaaagcttgaggacgcagggcacaccgttgatttagcctcaccttttggaggtaagccggaagtagacgttcgaagtatttcagaagactttgatccagacggaacgtataagaaattatatgaatcaggaagagcggatcaaacaatgaaacttgaagaagtagatgctgagaactatgatgttatcttagtagtaggcggccacggcgctatgtttgacttagcaaaaaatgtggacttgcatgcacttatgaacaaagtgtacgacaatggaggtattttagcagctgagtgtcacggaccttctgtttttgctttcttgaaaggatccgatgatgaactgttaattaaaggactagacgtaaccggttatcctgatgaaattgaaccggaagaagtacttccttttttaccatacagtttagaacaagaacttcgtgaagtggctaattacatccctgagatggataaaaaagcatatgctgtttgggcaaatgatcaaattgtcacaagccgagatcctttttcttctgaattaatgggtgatgaattagttaaaaagctaaataaataaactaaaaaaagactgcttaaaagcagtcttttttgtttgttctatagggatgtttgaaactgctgctctaccaaacgccggtaaaaagaatgagaggctaacagctctttatgcgttccgcttcctgtaaccttcccttcttctattacaacaatttggtccgcattaatgaccgtagatagacgatgtgcaatgacgagtgatgtgcgttctttcattaccgtttccaatgactcttgcacaagcttttctgattcggagtctaagctagctgttgcttcgtccagtagtaaaaactggggattgcgtaacagcgctcgggcaattgcaatacgctgtcgctgtccccctgagagattaatacctctttctccaatcattgtttcatattgatcttcaaaggactgaatgaaatgatgagcattcgctaacttcgctgcttcttctatttcttcatccgtcacatgccgctctaatccgtaaatgagattttctcgaattgttcctgctaaaatcggagaatcctgctgaacatagctaaacaggtgacgccacgaacgtaagttgacgttttgactgtctgttccatccaagaatatgcgccccgatgaaggctcataaaagcgttcgataagcgaaaaaacagtagattttccagctccgctaggtccaacaaaagcggtaacttctccttttttagcagaaaatgaaacttcctgcaatactggtttatcttcatattgaaaagcaactttatcgaaccttaaactccctacctgttcaagcacttctccattttcatagttctcttctttctcagctaatatatcaaagattctttctgaagctcctttagtttgctgaaagctagtaacaaatcgggtaagtgaaccaaccggaaccataatttgaaaaaggtaaagaacaaaagctaccagctctcctgcagtgataaatccctcactcacacgatatgcaccaaacccgacgatggcaatcataacagcggtcatcaccgtgctaataatcggggtaatgatggcttcaattttagctctctttacaccgaagaggtagagtgactgaaacgattgtaagccggaaccaacttcttttttctctgaaccggatactttaatcaagcggatttcactcagcatttgagctaaaaaagctgtaagcttggacattttatcctgctgctcacgtgaaattttatgtatttttcgcgctaggggcataaccagtacaaacataacgggaataaccgctaataaaatgagcgtcatgggtacatcaagcgtaaataaaataacaatggcaacgataatagataaaatatttttaacaaagtcaatcatttctgttgacaataaattcatcacaatggttgtatcatttgtaatgcggcttaccatttcaccggaacggttttggtcgtaaaatgaaatcggaagctttatgagcttgttccacactttatgtctgagttcttttacaacaccttgtcctacttgagcaaggagataaagagatactgcgcttgttaccatttgagcagcgaataaaccaaggagtcctgctataagctgcggtgagacgcctactgcaattttctccatcacttctttaatgacaagagggatagaaagcgacgctccggtattaattaaggccagtatgaacgaaatgagtagctttcctgtcggagggttcgttagcaaccataattttttaaatgaaaaatgaattcctttttgcgtattcatcttagttcctttctaattcttttaataggtggtatacacactttaggcaaacaccacacactttaccttcaaagttccatcttattttacaccatttcctttcttaacctgaacttctaagcttttacctatttttcaaactcgtctatacgaaaatgacaagctggtcatacattatggtacactgaattcttttactagatgagaggttgaataaggatgtctgtttatattaaatctatttctattggaacaatttctggcgggatcgttatttttggaaacgcaggaaatatatcgcctccaagcggctctacgtccggctctggttctagctctaactctggttctaattcccaaatgccgatgcctccttctccgggaaaaggcccgagagataatacagcttttaagggctaataaaaaaacagtgagatatttctcactgtttttagacttgaatacttgtcatcatcgcaatataaaaagcaaaaacaaacaaacccgaacttaatacgctaagccatactgtctttttgtaaaaacaaataagtaaatacacaaaaaacagcagtgcgacaaataagaataggattcccacaatcgttacgtgaaacgttagagggagcgtcacttgtttcccatagataaatggaagaatcgatgaatccattgccatatgacttatattagttggcggcgattgcgttaccatgatagctgtaaataaaaaaatgataagcaaaataatgctttctgctcgaatccacatcacgggcttatattctggatgttttatcgtttttttcataagaaagccattgaggacggcaaatgcaagcagcggaataatcgtaatatgctttagcaaaagggactgcccgtaatctgtagcccatgaatttacatagttggacagacccatgataatgaccatcgaaatgaacccacttaatgaaagaagcacaaaacaagcgattgcaaaaggagtaaaccagcttaagaaacttttccaattggaggtttcttttgaaaaagcggaaacaatcagaaccacccctccccacagtccaactgctaaaatatgaagagaatgagaaagcatgccgctaagcgcagaagcggatgctgcgtgacttgcgtaggcgattcctcccaccaaggctacagtcagtaatgtatacatatgagggtggctctctattgaaacagcaaccatacataaaatagcaattagcacaacaaagatccaggcgtgtcccgttcttgtttccaataatacaagacgaactgtttcacctaaccctcttatttttgaaaaagataaaataatctcaagcgaatttccaaccgaaaaaatagcgacagccgctgcacttgcaagtagccatcgctttgataataaaattgttggcttttttgtaagcggtacatattgcagtacggcaaatcctaataataaggaaagacctacgtatgtgaaccactcaaaaacaggcaacaaaatactcatctttttaagactttttctttctgaagattaagagtaatgctccaaccacaactacaatagcaataatcatgataacaaaaaacgatgaagaatcattgttctctgttttttcatcatttgctactgcacttttttggtgctgttcggattgcgtggcgtcttgctttttttcactatcttttccggctgcttgagtattctcttctttcgcttcatctttcacatctactttaaaagcaatcgaatctttcattacatgaccatcttcccctacaatttcccagtccactgtgtaagatccgtttttaagaggctgatcgagagaagctattaaatcatgaccctctactttttgcgatgcaagtgaaattttttgtccatcttttgtaacggttacagtactgattttctcgatgtgtgtttcaaaggttaatttaatttcttttagaggagctgtaacagttgcaccattttccggcacggttgtttgcacatgtgtatgagcaaaactaactgtcggaacagctaaaaagcatgctaaaagtaaacctattatttttttcatatttatgactccctatctcttttttcttttttcatcatatccaaaaatgtttttatgtagacgtttccgaacacgatctattttcctagtaagtgtactccttttttactcagtctcacaataactattaccaattcgttataaaatgttcacaaatcctaggaaagatgccgctgtgatttttttgaattttctttcggactatccttgaatatagtaaaatagttaaataagatgactgacttttttctagcttaaaatcccatacagaaaggatagaaacaatgaaaaagtatacatgcccttgctgtggttatcaatctttagacagtgatggtgactatgacatttgtgagatatgtttttgggaagacgatccgtaccaaaagctgaatgccaacgaattaggagccaactctatttctttaatagaagctcaggaaaattttatagtttatggagcgtgtaataaagaaagcttacagcacgtgagaaaaccttctgttcaagatgtaaaagattttaactggaaacctattataagtcacgagtagcaaaactagtttataaaaaaagaatgcttgcgaaagcattcttttttggattcagtaagaagtagaagcgaatgtagaaagcacatttgtaaacttataaaaagtttgagttttagacgaagctcttccttttgaagtgaatgaatgaaacatagcacttcgcagcggttggctaatctctaattgaatacttttcccggtacgatttttatttgcaatatttccagagttaatgcctgcaatctcatcgtgcccttttgtaatcagttcggcaggaaatccattttgatttaataactgcgttaatttttttgcgcgctcccgatcagtcccgcccacaaaaatatgtttttcgttctcagaatacccgtgaagagataaaacattatcatacttgcttaccatcttacgcgctgtgggctcatcaaaatgagtgcttgtgaggtgcaggtctcgtgatcctttcgactttaacgattcgaataggtaaagagcattttgtttgccaagctcttgggcaatttcgcttgtccccccttcaattcctccaccgtgtggagcaaagataaggacagggcttttcgtttctttggtcgtcactttatagctagctgaagactcgtgctgtgagagctgcttgaaattttgatatttatcagttgacgcactagatgtatcttgaaaaggtgaaatgaataaaaagagtagacagatacataaggtagagaaacttactaaacgatagcttttcaatttgtactcctgctttccgttgtgtaataagacctaaaacattaggaacctaaaaaatccaaaataatatttatagtagtcttatttacttatcgttaaaaattataatttatttaatagttcttaatacctatttatgttgtttgaaaaaacttcagcgcatattcactgaagtttttttactttttttgtttttatttaaagcaagcgccaaactaattttatccagccaaagaatgcgatccataaaggtatgctcaaagatgttccccacgctaaaccaattaagaagtttcctctttcaatcatacaaaccactccttatgaacactgtaggtgaacaagtaccattctataccttcactataacagaaagcgctttcatttaatagtcacttacacgtttttagtgctatattcatacagaaaaccagattccaagtagataaagggcgatatataagaaaatgaataattgcaaagtgtaaaagtataataatctactaaaaaaaagaaaccttctttgaaggtttcttttctaggtgttttttattgttcgccgctgcgctgcaagcgattctcaataaataggcgctcaacaaatttatttagctgtgcttgatacaaacggcgctcctctagcgtttttgcgtcttgtatttgctgcttaaagcgtttgatttgctgtctttgttcaaccgttacatgatgagaaagaagcataggtccccctccatttcactaacgtttaaattaagtaaaccaaggtttaccaaaacaaacaacaaacctgttagcttctcttacatacattttttattcagcctctttagccccaactaatgctaaacctggaccgtacggcgttgtatgaacatctagcattaattcatttgtataaggcacaatagaagcttccattgctacttgtactccatcgacttcatacatttcatcattttcaaaaggctcttcaaaagctaacccaatattagggatttcacagctaattcctttaaaatacaagcgaattcctgttatctcctgttcttcaagtatattgttaattaattgttttgcttctggtgtaatatgcatgactaacccttcttcctttcaatactcttgctctatcctatcatatctttagagtttttaaagagaataactacgatttaaaagcatccttattattatttaataattattataaataagtattgattttaatttgatatttgatataatataaatataagataacaacaactcattaggaggctattaactatgaatttagaaaacgtattgaaccaacaaattgccgattttaacgtattgtatacgaagctacatcgctttcactggtatgtaaaagggcctcaattttttacgcttcatgaaaaatttgaagaattctataatgagacggcggactatatagatgaatatgcagaacgattactagccattggaggaagcccaattgctacaatgaagcaatttttgcaagcagctactctttctgaagatggaaacgagcaaacgagtgaagaaatggtagaaaccttaattaatgactatacgctacttgttaaaaacctaaaaaatgcagttgaaaacgctgaagcagcacacgatcacgtaacagctgacttattcattggaacaatcggcaacattgaaaaacatatttggatgctaaaagctgctttacctgtaaaaacatccgtaaacgcataaaaagagcctaagcggctcttttttacgtttgttgatttacttttttttgtctttgcagccacataaaaaaagacatatcatcgtgaatgtcatcttctagcacagccttatagacatgatcactcgtataatagcgattatatccgctttgctgcttgaaaaataaaatgcattcccgcttcttttcagtgaaaagtgattttaataactcttgtttctcaactttgcctttcacgatattttctggaagcacggaaatatcaagcttccactcttctcccttctgaatcatatacacactccactgatacttatctttttcattagcaaatatcatcttataagggctaaaacgctttgtaagctgataccccatgtgaaaaatagattcttcatccatttcatcatttcctacgtaaaaattaatgatgcgatttgtcatgacatttaactcaaaactctcccctgagagaagacaaccatattctcttaacagatccaataaatgactggataccaccagttgatttgcttcgtgttttaattcacttgagtatgacagcagctcattcatgttttttgattcccctatctatagatcgtgaattgttattgatattcgcttttttttcataaaaccctttcacttttaccctttaattaaataactagttgtaaattaagttatgtagagcaacattttatgaataaatcaagtttgagtataaaacctgaagaagtttaaagactatagtcgataccgattttaaggaggacttagtatgaataatcacgaacttcctacaaacatgcaaactggagctgtaccccctcaattgaaccatggagggcatgaactatttgacgttcatgaaacacttgcgggctcgattaatgtaatggatcagtttatgatgtttaggcaatatgtaaaagaacaagagctgcttgatatcattgatcggcaatatcagtttattttaaatgaatataatttaatcgtagaagctttttctactggtcaaaagccggccgattctacacatgtatataacatgaagcagtctcatacctttgtttatggcttaaagccttcacagcctaaaaagccgaatcagtccgttgaggaaatcaatgaaaaaggcatatcaggtcatatgctaggtctagttaagtctcaagcatctcttttaaccatgaccgctttagaaataacaaatcctgttgttcgccgaatattcggagacagtgttcctaattggattgaaatggcttatgaaatttctctttatcaaaataaacaccattattatcaagtgccgcagcttgcaaaagcagatatgcagcaaatgattacaagttttgcaaaagccactgcctctcctcagatgcctaataaccataaactgcattaattaaaaagaggctggagcaaacgtattttagttgaaggaagatccgaacgattcaccgttcggatcttttcattagtacggtgaatataggttatgtttagagttgcttctagctgttgattggagggaaaggcgaagactcctgcgggaaaagcggaatagatgagaccccacaggagcgaaatcgacgaggaggctcatcggccgcctgcggaaagcgtagccttgcacggaaatcaccagcagtgtaaccaaacgactcatactagatcatttactcagtttactcgtctttagattgtattgtattgattttgttatgtctcaatctcgttttgtgcgtatatttcagaaaatgacaaaaaactatgcattttggattattttctgaatatttgtagtattttgattaattatgtattataatacaattaactaatagaaaggggtgagagatgcatcatatatactcggattacagttaaaggaggtgtcataacacactcgcaatacgtttgctaaaagtcagttgaactgtagaaccgatatgtgatagaccatgatggtaaagttaagattaattcccctaaatgaacatgtaacataataaactgcttctttttctttttaaagatagaagcagtttttttatgtgcgtttttcttttcttgatttaatacatgttttctccactttggctaacacttaatatatacatttacatacaaggtggtgactttgatgatcgccgtaaaattactattagtcgcagttttaattgcattaactgctttttttgtagcgacagaattcgctattgtaaaagtaagaagttcaaaaatcaatcagcttctagaagaaggacataaaaaagctgtatctgccaaacacgttattacgcatctagatgaatatctatccgcttgtcagcttggtatcaccatcacggctctcgggcttggttggcttggtgaaccgacgctagatcggttgcttcaccctctttttactaccttccatacgaatgagccgcttgctggtattttatcttttgtcattgcatttgttgttattacttttttacatgttgtcttaggggaattagctcctaaaacgtttgctattcaaatggctgaacaaattacgctgaactttgcaaaaccgattatcgtgttttacaaacttatgtatccgttcattaaaatattaaatggatcagctcgtatgttgactaagatttttggtataacgatgatttcagaaaatgaagctgctcatagtgaagaagagctgcgtattttgttatctgagagcttcgaaggcggtgaaatcaatcaatccgaatatcgatatatgagcaaaatctttgatttggacgatcgtttagctaaagaagtaatggtccctcgtacggaaattgtgagtgcttccaaagacgacgtcgtagaggtttttttgcaaatcgcaaatgtcgaaaaatatacgcgctatccaattgttgaagatggggataaagataaagtaatcggtctcgttaatatcaaagaaatttataatgatattgtattcaacgaaaaagacggcaccaatacgttagagtcatacgtcaagcctatttttaaagtaattgaaaccgtacccattcatgacttgcttgtaaagatgcaaaaagaacgtattcaaatggctattctttttgatgagtatggcggaaccgctgggcttgttacagtagaagatattattgaagaaattgtgggagaaattcgagatgagtttgatacggacgaaattccttatgtacaaaaaattaaagacgatcattatattcttgacggaaaaatgctcattagccaagtaaatgatttactcggtacggatattagcgacgaagaagtagataccattgccgggtgggtgttaaccgaaaagtttgatgtgaccaaaaatgatatcattcagcatgagcaattttactttaaagttctgattatagaggattttcacattaagtatatagaagtaaaaaaaagaaagaagaaagaaaaaaaggatgatcatcattaatcatcctttttatttattcaaaatcccttttaccaatcgtctcctccatcaaaaaaatctccatccaacagatcttccccggcttcttcaatatcttctccaatttcaccaagcgccgagtcttcaaacatatcatccatcaaattctcaatgagcagtccgcctaacataccggctgcaaaacctcccattgctccccctaacccgctcatacgtgggtggtgtgaatgctgatcatagtgaggagacttataatattcatagtctcgaggattctccatcatctcttccatcgcttcttccagcaaacgagcgatagtagatggctggcttagttcatcatttgtaaaaaagagttcattttttatttccctctcacggccaaaagaaggcaaatctagctccaacagcacgcggatcccttctctttcaatggctacctcaaactcaacctcatttacatatccctttaagaagtctgtagggaaaaatgaaaattcttgtttgtatccgttaaattttcctgaatgatgtttttctctaaatccaagtgcttcaaagccctctactagctgatataagctttttggagctttaatgcgcacagggtcccggtctgttgagtctactcccccttcaatatctaagtgtgtcttaaagaaatagctaacgttgctcgcagagattggaaggtccaaaggtaaatgatatgtaaatggaatttcttttttctcgccttcattaattgtaaatgaagaagctgcgcgcaggctttccacacgatgtgtatgcatttgaccgcttttcaattgaacttcaagccaaaattcaacatcaattaaattaatatgttgctgaacgtttccaccttggatgacaatagctccttcaattacatgaccgagcgtataggcggtttcatttaatcgtaaatccactttggcagctccaactccaattttagcaaacatttttttaaacatttttttcctcctccaaaatgctcttactatatatacgaagtataccgtttataagtttcaacttacaaaaaaaaagaactcaatttcttgagttctttctgctaaatcaacgcttcattttaattcaattatttattaaattaaaacacccagccccaacagcagcgacgtcttttacaaccgccgtggttaccgccatgacaaccgccgtgacctccaccgtggttaccgccgtgacctccgccgtggttaccgccgtgacctccgccgtggttgccgccgtgacctccgccatgacaaccgccgtgacctccgccatgactgccgccgtgacctccgccatgactgccgccatgactgccgccgtgacctccgccatgactgccgccatgactgccgccgtgactgccgccgtgacctccgccatggttgccaccatgatctccgccatggttaccgtcgtgacctccgctatggttgccaccatgatggcattttttatgtccagaacgatgatcatcatcatgtttaggacaatgatcgttatgcttataatcgttatgacagcattttccttcgtggctacttcttggatcatagccagaagttttgtaataatactgattagaacaccagcaacacttctttttattgttgtaactcacataaaccatccttatctataaataagatttatataggcaattttatacctatatataaatagattatgtaaactagtacaaggaagtgcattgctgtgggccatgacctaagcctgtttttaggagtatgtacgggggagataagacaagaaaaaaagccatctctagatggctttttttatatttgatttttcactttacttgcgctttctgcataaaactctagaatttctcttcttcttacaattccaataaatacaccttgatcatccgttacaggaacaaaattttggtcaattgcctttgaaaggatgttttgaacttcatcatatatagcaactgggttataatcttgatagcggtcaatctctgttaatttaatattttccgtatcttgaaagcgatagtctcctaggctttttagcttccaaaggagatctccttcagtaagaacgcccacatatttaccatcatcgtcaactagcggaactgtagaatagcgatgatactccattttttcaagagcctgtcttaatgtggattgaatatttagtgttacaacatcactttttggtactaagaaaaatgcaatattcattttttaatctccttttccttacccgctcatcttacaatttctatttattttttcagttttcggcttattttaatgttttaatcatacaaaatgcagctcgcagttatcttacatttacaactataagctgtcaatcctaagctatgtaattttgacttcttattttctttattacagtacccgttttctaaataatcaaatcctaatttttagaaaaacacgtctagttaaaataatggttcctgcagctgcttctttatactaataagggccggaagagctactttcagctcttcttctctgcgataagaacgcaactgaacctcattatatgctctgtttatactttttgactcatgaaaaagtcccacatgattcgactagcattgggacctttagggtctgtatagctgcccgctgaattccctcctgaccatgcatgccccattccattgataatatatttatcaatagccaattctcccttactgctttcgtagcgatatgttgtataatcccgtccaaagagaattttttcttctctcgttttaaccgggctatcttgaatccatccatctattcttccattataagcaagattattcgttgtaatccactggtgaaccacttgatctgcattggctacatttaccgtagaatcagcgttaccatgaaatacaatgagcggcagtggctttgcccgttttcccatttgctgataagcaattcttccttgtttaacgggggaaggacctttactggccatgacagaatacgcattaaatacgttaagagccgcctgatattcgatacctgctgacacacctattccagcaaacagttctggatacgttacccccataacaatgctcattgctcctcctgctgacagaccggcaataaacactttatttttctgaataaagtgcatgttttgaactttttttacaatccctgcaataatagctggctcgccaaaccctctaatttgatgaagaggttcaaaccagttccagcatttattcatatttgagttagaagactgctgtgggtatacgacaataaattctttttcgtcggcgagctcgttcatttgcgtgcctattgcaaaatcatctgcattttgtgtacatccatgcagcataaccattagtgggtaagattttaaaatatgataggatttaggtaaatagactttgaatttttttcctttatgagtatatgttttaaatgattcagatgacgcttcttgttgttcacttgaagacacaagcgttgacgtatttataacattaggtagtgaacccaacatggtacccctcctctttttgtcaacgttttcatttttcttcccaattacgtcctgtattacaatactacatattatttcttttttttgcacgttctacatactctaagagtacaacttgttttggttttaagctgtttttatcttcttgaaatttgggatttttttgctatatatatactttattactatatatgaaaattgtcactataatcatgaaaaaaggacaaacatgccgtttgcccttttatttggaccttgatgtttaaatatcttttgccgaattaagcctctatacttttattatatgatgctccctatcatttatatgaatttattgctttgcatgtttaaatctgtaacctttactattttatactttgctttttattcaccacttctttcgcagcaaatggcaaggtgtaggtgcagaagccacgtttaaaaagaagaatcttaaagagcaaatgttttggtttaacctcttcttcgttcgcaacaattatacaaaggctgattgcaatcactcttttcccctccttttgcttaaataagtacagcaaagagatgctattggagtagattcctttattttgcatacattttttagaaaactatggtaaaaataagacttatcatatggaggtgaataaattggcaaatatcccaaaggatactgagccctactggcgcgatcatttaaagtttccaacatacccatctctttcagaaaatcgaaaagttgatgttgtagtagtaggaggcggtattagcggtattacaacagcttatttattacaaaaagaagggctgaacgtggcgttaattgaagctgataatattttaaatggtacaaccggtcacacaacagcaaagattacagctcagcatgacgttatctacgatgagctgctttcacacattggcgaagaaaaaacgctgctgtattataaagcaaacgaacaagctctgcagtttatgaaaaacttaattcaaacggaaaacattgactgtgatttttcggtacaagatgcttacttatacggagaaacgctggagtttgatcatcgagttcgtaaagaatttcgagcctatcagcgattacatattccatgtgaatttgcaacagagcttccttttaattttgatattagggcagcagctattatgaaagatcaagctcagtttcatccgttaaaatatctgcttcatttagtaaaaaaattcacagaaagcggcggattgatttttgaaaacaccgtagccacggatgtagaagaaagcacgtcgcccaccgttgtcacaagagacggacatcgaatttcttgcaaatatgtagtggcgtgttcacactttccattttatgatggagccggcttttactatacgcgcatgtatgccaaacgttcgtatgtgttagcagcaaaagttgaacaagcttaccctggaggcatgtatttaagtgctgatcagcctactcattcgctgcgttcaacaaaagttgacggagaagaactcattttaattggtggagaaggccacaaagctggacaaggaattaatactatgttccactatgagtcccttcagaggttcgccgaagaaaattttactgttcaacattttcgttacaaatggtctgcacaagatttatttacgcttgataaaattccatatatcggtcccattaaagaaagcaagccaaatatctttattgctaccggatttaaaaaatgggggatgactcatagcaccattgcagcacatattattcgagatgcaataaccggaaaagacaacccatatgcggagttgtataatccgtctcgtttttatgcggaccctagccttaagcatttctttcgtcaaaatcttgatgtggctgaacactttattaccggtaagttttcaatgcctgaaaaaggactggatcagcttcaaaatgatgaagggtcggtcgtatatgtaaatagcaaacgtacgggagcttataaagatcctcaagggaagcttcactgcgtcgatactacatgcacgcacttaggatgtgaagtaaattggaacgctggtgaccgcacgtgggactgcccttgtcacggttctcgtttctcttacgacggatctgtggtagaaggccctgctaaaaagccgcttacgccagtggatgtcgattcaagcgataaaaaaagcacgccgtagggcatgctttttttatcattatcaatagattcacatttgagtttactctttacatccttcttttctaaaatatcgattatacaccaaaaccattgcataaatgactaaaaaagaaaacgtaaagataattaaccttccagattcagggacatgatcaagatagtctgtttcaaaaaacataacaaacatcaaaaatggcaataggaacaaaaaccaaataaaatctcgatccataaacatttttataaaaaataaaatggccccgatgtagacaatcatcaaaaacataatcattcaccaaattctatttaatactagaggtgttgtaatgattatatcggatttctccggcgaaatatagagtcattggttttaattttataaattccttataactttcaaactgctattttaacataataagggaatttactgctgtaaagactctaagtgagcaaaaaactgcgggtaagagacggataccgcgtcacgattttcaataattgtttccccttctgcaatacaagaggcaacagcgagcatcataccgatacggtgatctccgtggctgtttacatttgctccgtgaagttttgcacctccgtgaataatcattccatcttccgttgcttcaatgttagctcccattttggttaactcattcactaccgtatcaatacggtttgtttctttgacttttaactctgcagcatctttaataatcgtaatcccttctgcctgtgtggcagctagtgcaataattgggatttcgtcaattaggcgtggaatcaagtctccgcctacttccgtaccttttaagtgagaagcttctacaactaaatctgcatagggttccgctgtttcttttgtttctttgactgtctcgatcgaagcgcccatatttgaaagcacatctaaaatacccgttcgagtcggattcatcccaactttttgaatttcaatgcggctgtttgcaacaatagcccccgctactaaaaagaatgcagctgacgaaatatcaccaggcacttctacatgggttcctcttaacgtttggccgccttcaattgaaacggttaagccttcttcttcaactttaacaccaaatgcctctagcatacgttctgtatgatcacgtgatttcgccggttccgttacagaagttgttccttccgcctgcagtccagcaagtaaaatagctgattttacttgtgcgcttgcaacgggagatgtatagtgtataccttttgctttcccacctcgtataacaagcggtgtaaaattagcatcttttcgaccgtctaaatgaatattcatatcacgaagcggaccggtcacacgcttcatagggcgtttggcaatggattcgtctccaatcaatgttgaatgaaagggtgtatttgctaaaatccccatcataaggcgaatcgttgtgcccgaatttccaacatctaaaatatcagatggctcttttagcgcttgtatcccttttccttttactacgacgctttgttcatcaatcatttgaatatctacacctagtttttgaaagcaggaaatggtgctaaggcaatcgtctcctggcaaaaatccgttaatcgttgttgttccttctgcaatcgaaccaaacataacggaacggtgagaaatagatttatcccctggaatttgaatcgttcctcgtaaagcttttactgtcacaatatgtctctccttttatgcgtgaagcgaatcacgaaattctttggcatctgaaaagtaatcaaataattcgtgaccgtcacctttttctactaatagttttacttgttccatttctttcatccagtcatcaagcaatgttaaaagcatagaacggttttgttttagtatatctctccacatatgaggattacttgaagcaattctcgtaatatctcgaaaaccgcctgctgccatttccgtaacaagatgattctgtgctgaatatccttttacttgtcttacaagactggtcgcaatcacatgaggtaaatgactgacaactccagtgatttgatcatgagtagctgcatcaagcagtacaaattgtgcacctgtaggctctagcaaatgcataagcgcatctattttttctttttgctcattttcaaacggcgttaaaatatagcgcgccgaacaaaataaatccgctcgtgcattgactgcaccgctcgtatgagaaccagccatcggatgcccgccaataaatgaaatacgtttcttattcagcgcttcggctgctttcataatttcacctttggtacttccgacatccgttacgataaccgtttctttaagcttccaagtagaaaggtcgtgtatccatgctgtcgtgtactctactggagtagcaagtacgatataatctgcttgggctgcttctgtttttatatcttcagctacataatcaacgatacctagctggttggctacttgtacttcatttgtattgatatcagctccaacgactgtgacgtgacgatgcttcttcatagctagcgctaatgatcctccaataaggccgaccccaataagtaatacacgtgttttcacctttcattctcctctattcattaaaattgctttgcgtattcttcatgtttttttacgttttcttgaattaactgaattcgatctgccccaaattgatcgataatagcagatgctagttcccaagcaatcactgattctgctacaaccgctgcagccggtactgcacagctgtctgagcgttcaatacttgcagcaaatggctcttttgtatcaatatctacactttgaagcggcttgtataaggtaggaataggtttcatgacgcctcgcacaacaatcggcattcctgttgtcatgcctccttctaaacctcccgcattgttcgttttacgcgtatagccgttttgttcatcccatagaatttcatcatggacttcacttcccggtctgcgagctgcttcaaagcctacgccgatttcaacgcctttaaacgcgttaatgctcataatagcagcagctagctttgaatctaacttacgatcatagtgcacgtaacttcccactgcagtaggcattccttctactactacttccactacgccaccaatgctgtctccattttcttttgcatcatcgattgctttcatcattttctgtcccgcttcttcatctaagcagcgaacaggtgacgcttctgttttttcctgaagttctgtcagtgactcatatgccgttttttcagctttcacaccgccgatttcaagcacgtgacatgcaatatttacgcctacagcttttagtacttgtttggcaactgcgcctgtggctactcgtaccgtcgtttcacgagcagatgaacgttccaatacgtttcgcatatctctgtgaccgtatttaatcgctccatttaaatccgcatgacctggacgaggttttgtaatttgtcgctttacttcttcatcatgatcaactggatcagcacccataatatttctccagtgagtaaaatccttgttttcaacgactaaagcaatgggtgaaccaagcgtctcaccgtggcgaaccccgcctttaatctgaacttgatctttttcaatctgcatgcggcgtccgcgcccatgtcccttttgtcttcttgctaaatcttcattaatatgttcggctgttaattcaagccctgctggtactccttcaataatcgctgttaattgaggtccgtgcgattctcctgctgttaaatatctcatattatcgattcctttctgttgtaaaaaataaaaaactcgcccctacgtcatagggacgagtttttctcgcgataccaccctagttgcaaacattgcttgccacctcgaattgttaacgatccgctgaccgctctgtaaaagagtacttaaagagtgtaattcgctcacatttgtgtactgacttccaccaaccgtcagctctctgagacagggaaatgtttgctactagtttcttatcactgtatcactatgaaattaagataattttactgctgcaccttttaattcttccatgaatttgtggaattcaggaatgttcatttgctgtgctgaatctgatagtgctactgctgggtctggatgaacttctgccattacagcatctgcgccgatagcaatcgctgcttttgcacatggtaataataagtctttgcgtcctgttgaatgcgttacgtctactacaactggtaaatgcgtttcttttttcaagattggaacagctgagatatctagtgtgttgcgtgttgcacgctcgtatgtgcggataccgcgttcacaaagaataatgtttccatttccgcgagacataatgtattcagcagcgttaatgaattcttcaattgttgctgccaatccacgttttaaaagaatcggtttgtctacagaacctgcagcttttaatagctcgaagttttgcatgttacgtgcaccaatttgaattacatctacgtagtcgagagccgtttcaatatcttgaggagaaacaatttcactgataattgataggcctagctcatcgcctacttgacgtaagatttttaagccttccaccccaagaccttggaaatcgtaaggtgatgtacgtggtttgaacgctccaccgcgcattaacgtaataccttgttctttaagcgctaagcccacttcttttacttgttcgtagctttctactgcacatggtcccattacaaattctaagtttccaggtcctacttttgtaccgttgatgtcaacgattgtatcttcagatttctttttacgagatacaagaagtgctttgcggtgatcgtcttcttgaagctctaagcttgctttgaaaatttctttgaaaatatgctgaattgttgaagcttcgaatggtccattatggttagctaagatttgatctaacgatttacgttcacgaactggatcaaagcgattcacaccttgtgtaccttttacttttccgatttcttgtgcgatttcaccgcgtttatttaataattctaaaatttctaaatttatttcgtcgatttgtcctcgtaattgttctagtgattttgtcattttaaaaatcctcctttgattttataaccttgaacggatcttctcgtttagtttgtattgaaaaatccgttttacacctacacagccgcttatgcggatatacaaaaagtccctactgattgtatcagtagggacgaattgatcgcggtaccaccctaattgcaagcattgcttgcctcttcattaagataacggctattgccgcttttgactattgccaaaagaaagctccaagaatgtaattcgcaatctcttttgtactgattcgcaccaaccatcagctctctgaatacagggaagattttgctactatgctcttttcatcgcttgtaatggatataaaattataatgggccaaaatacaaaaagtccctactcacccttaagatttttcttaagagtcagtagggacgaaaattcgcggtaccaccctagttgcaagcattttgcttgcctcttgattaaaataacggctaggccgtcttttcctactcggaaaagatgctcaaggaatgtacttcgaaaaaatttgtgttctgactcgcagcaaccgtcagctctctgttacagggaaattttttctactagtgctcctatcaacgctcagtattgactatgtatgtgtacttggataatcagttccgatcgtttgaaactgtttgtcgcttccaagttgtgtgtaatgttgtgtgatgttgatttgtattatgaatggtttttttatcttcgtcaacactttttattaattttttttattttttaaaaaccatagctccttcaaacccatctctatcaagagttttgctgatctagtttttttcaaacttgtattccatttcagattcatattcaataaatccatgtttttgatacaagctttttccagcggaagaagcatttaaccatattcgatttacaccatttttttggcagtactgcatcaaatgctttaaaacagctgaagaatagccgtgctttcggtgatcaaaagctgtatacatgttcataacatatgcttcttttccctggaggttactcggtgaaggcggacgtataaaaaagacgatgcttcctgctgatacaatttctccattcgcttttaaaatagccgtatagctatgtggattatttatatttgtagtaaaatattcttctgtagcttttcgaaacagctcctcattcccgtttaattctcccagttctttcataagcaaaattcgcaagttaactagatcctgaacgttttctaacaccgctttttcaaccatgacttcccctcttttcgtctcttttacaaaaaaaaactctcatccttcgagagcttcattcacgcaagaaaaacagctccgtatacgagtgctccgacaataacgaacgctggatgcacacgcaatttttccaataaaacaaagctggctgctactaaaaataaagtttgccatatccctgaatcaccgtatgaattcataaaaaattcatatgccatcaagcccagtaaaatggcaataaccggacgaatgtagttcgtcattttcttaacatttggcgaatctttatacttaaataatattcgaagtaaaataactaaaagtaaaaccgacggagcaatcgttgcaaaaagagcaatcaccgagcctaaaatccctgcctgttgatatccgataacccccgccatttttgtggcaatcggaccaggaagcgcatttccaattgccagcatttcactaaactctttgaccgtaagccaatgatagtgatccacgacttctttttgaataagcggaatcgacgcaggtccgcctccatagcctaaaatatttgaaacaaaaaacgccataaatagctgaatataaatcatactgattccctcttttgcttgtgttcagcactttcacctttttttccttttcgttttagcggaatccaagctgctgccataagaacaataataatgaccgctggatggatatgggcgaattctattagccctaaactaataatcagtaagataatagctggcgtccaccctagaccagacgttgattttttaaaaaagtcccacgtcataaccgcgagcataactcctactacaggaacaactgctttggtcatacccataacccacggctgatctttaaattgcgttaaagttgttaacagcaataccattaaaaaaacggttggaataacggctgcaaataaagctgtcccgagacccaaaataccaccgactcgatagccgatgtatccagccagctttgtagcaataggcccaggcagcgtattggcgattgctaataaatcgccaaattcatcgtcatccatccacttgtacgtatcgaccacttctttttttacgagtggaatagctgaaggtccgcctccgtagccgagcatacctgagcgaaaaaacgctataaaaatatccaattgtcgcatttctcgcgctcctttctctgtgatctaataagcaacgaccgctccgtctgttcgcgcttctgtgccgccgtataatacaccggtttgttcatctcttaaaataatctgtcctcttccaaacgtatgtctgctcgtagccacatgaatatcatgccctttgcgttctaatgcttctacaatatgtgaaggcatttctttttccacaagaacctttttatgttcaatccactgccatcttggtgcatctaaagctgcctgaggattcagatggaaatcgatcatattcatgacgacttgcacatgtccttgaggttgcatgaatttgcccattacaccgaatggacctacagcgcttttattctttgttaaaaatccaggaataatagtatggtaggttcgttttccaggctctaatcggttatggtgctgtgggtctaacgaaaaattatgcccgcggttttgcaggcatatgcccgtattaggtacgacaagtcctgagccaaaatccatgtaattactttgaatgaatgataccatgtttccttctccatcagctgtcgctaaatagatcgtgccgctatgagacggctgtccggcttcgggaacaagcgctttttcgccaatcagccctctgcgcttgtttgcataagaatcattcaacaaatcttcaactgctactgtcattttatcagcatctgtaatgaatttttgtccatctgcaaacgctagcttcatggcttcaatttgcttgtgatatgtatcgacagaatctttggcatcgaaagaaaagccttttagcgtatttaaagctaaaagtgcaataaggccttggccgtttggcggaatttcccacacatcatatcctcggtaagaagttgaaattggcttcacccactctgctctaaaagctgctaaatcttcttttgttaaaaatccaccgtattttttcgaaaaagctgctattttatcagctaaatcccctctgtaaaaagattccccattcgtttcggcaatttcaagcagcgtagcagcatggtccggtgatcgccacacttcccctactttaggagctgatccattgttggtaaacgtctcaaaccagtgcttatattcgtcaccttttaacgcgtgtgtaaatcgttcaaacgctcgttcccaattgtaccctaaaattggggagattgggaacccttcttgtgcatacgaaatagcaggctgcagcacttcttttaacgacagtcgcccaaagcgttttgacagttccgcccacgcgctgggggcacctgggaccgtaacaggaacaaaaccgcgagccggcatctcttttatccccatggcacgcagaacctcaatagagatggaagcaggagcaggaccgctcgcgttgagtccgtatagctcttcatttatccacacgagagcaaatgcgtctccgccaattccatttgacgtaggctctacaaccgttaaacaagctgccgaggcaatagcagcatctaccgcattgcctccttttttcaacatttcaagacccgcttgagcggcaagaggctgactagtcgctaccattccattttttccaaacgtacacgtacgctgagatgcataggggtgtgtaaaaaagtattcgctcatagaaaatctcctcttttctttatatgatgaataaaacgaatctttacagactagacaaggctacttcttcctcgtaaacttctaatgctgcttgtaaagcagaacctgcattcacggttgcaccgtttcgaataagcactgcttcaagaccagccaatgtaaagagaacgttgtcttttcgacagctgtatcccattgtaccgatacgccatatttttccgtgcattggcccaaaagaacttgcaatttcaattccaaattgttcaagaagcgtagaacgaactgcctctccgtcaatacctgagggaattaaaacacaagtaacggttggaacttttgaatgctcatccccgaataaagataatcccattgctttaataccggctacaagtgctttttcatggaggcgatgtcttgcaaatctttcctctaatccttcttctaaaataacgcgcagcccttctcttaaagcatagagcatggacgttgcttccgtgtgatgatttaatctgcgctcactccaatagtcttgaagctgactcaaatcaaaatagttgctgataatattcggacgcagacgaacagtttgagcatctgcttttgtcgcaattcctttttcaacttttttacgttccataataattttttcaatacgatcattgtacgtaataggtgccatgccggacggaacagataaacacttttgtgtgcctgcaatcaatgcgtcaatgttccactcatctacttttacatccgtaccgccaatagtagctactgcgtcgacgataaataaaatatcttcgttgcggcatgcagcaccaatttctttaagaggctgcattcttcctgtagacgtttcaccatgaaccattgcaacaattttcgggtttactttttttatttcacgaataactgtttcagggtcaaacacttctccccattcgcattcgatattgtgtacatcagctccgtagcgctcggcaatttccgttaataaatagccgaagcggccgaaaatcgggacgaacactttatctccaggctcaactacacttgcaagaactgcttcaatcccagctctagacgttccatcaacgggaaaagcccatttgtttttggtttgaaatagttcacgaagcatttccatcgtttcgttcataatgtgcgtaaatgcggggtcaaactgacctaaaataggtgttcctaatgctcttaatacgcgtggatctgcttctacgggtccgggtgtcataatcgtacgcggcggtgtatgaagctgttttgttatagtcatgtcaaattcctcctagtaggcaagtttatataatagttctattaagacctttactcctttttctaactgttctcctttggtgaattcctttggggaatggctgattccatcttggctcggtacgaataacaaacatgtgggaactcttcgtccaaatacctgggagtcgtgtcctgcaccgcttactaattctcgggaggagatattcttttccgaggaaataattttggaaagttcagataattcttcgctcatagcgacaggtttttcatccatccagcagtcgatattcacttctaaatcccctgctgttcgctttataatttccttcatttctcgttctgcttcttgtaaaacctcatactcatgatgtcttatatcgaccgtgaattctacatatcctggtattacattcggtgcatttggagaaagtgtaattttgccaaccgttacgtataaagcgttatgatatttttcgctcaattcaataaatgctttagcaagtttgcagctcacataaaatgcatcttttctgatgttcatcggggttgtgcccgcatggttactttcacctttaacagatactgtaaatcgtttctgcccgacgatactagaaacaattccgatatcgcaacgagacatttcaagctgctttccttgttcgatatgcagttcaataaaagaagcgatgtccgtgcggtatggctcgctgtggaggccttttccgaaattgagctgtttcattgcgtcatccagcttaaccccttctttatttataacatgttttgcatcacttttgctgtgtaatccatttatattgcctgatccccaatacgtaagaggaaatctgctaccttcttcttcacaaagtgatacgacctctaaggtttttgtaggggagccgtaatgcgcatacaggtactgcagagcaatgatacctgccacaacaccaaacgccccgtcatactttcctccgtttatcacggtgtcgatatgggatcctgttaaaataacttgttgttctgaacccgttccttgcaaccgtccaaataaatttcctacatcatcgtaatacgttttgaggtgaagtcccttcattttttcttccaatgccttttgagctgcattccactgttccgtatataaaagcctcgtgaccccttctttttcatctcccccaaactgtgacaaccagttaacgttttcttcgatttgctgacaaagcttagattttcccgtcatatctgcaaccattgctatccctcctgctatcttcattttaagaaaatgactgattgttttcattaacactttctacaatgatttagtgtttttttagctattatcactaaatatgcaaagtcttatatacgtcactttttctaacattatatgttatttattttatcttacaggattgaatatacttcttcattaacaatttatacatttttttctgaaaattttatttattttaactaaactttcttataaaataaaagatagataaagatacgcgtagggaaatgtgagaatttttaacaaaaggagtaataaataatggaactacaaactcttttacgcattccaatttatgagaaagcatctgtagtagccgggcaaaaaggagtcacccgcaaagtacataacgtcaatatgatggacgcacccgatattttatcttttttaaaagaaggagagtttttaattacaacgggttatcacttcaaagaacatgaagaaagcttagcaaaacttgtagaaggaatggctaaaaagaaatgtgcaggattggccatcaaaacgaagcgctttttcgagcacgtgcctgcttctatttgtcagctagctgatgaacttcactttccgatcattgatttccaaacggacgaaacgttaggcgcggttattaacgaatctctcagctttattttagataaaaaaacagccgagcttcagcaagcgatggtcacacatcagctattttcctcgtacatcttacaaggaaaaggcattgagaaaattatgcaatccattcaaacgttatgcaatgctcacgttgccctttttgatacccatggccatgaactcttttatacaaacaaacgcgaacccttttcactcccgatggaagaagcggtagcgggcgctaagcagctgtttttacgaacggtaaaatatacaaccttttcctttttacacacaaaaaaaaccgttacgctttttccgattgctactcatacaagaaagtacagttatttacttattgaacatcaagtttctttatccgattcagcgctcctaacgattgaacaagcgacaaacgttttatccttcgaaatgatgaggcagcaggctttgtatgaagctgaacggcgacgaaaaaacgattttttcaatcagcttgttaacaattattataaaacgcttgaagatgcttcctttcaagcacagatgatgggcttatcagcaggaaacagctatatttgcgccgtcgggaaaatccattctacattcacgccttacagcgatgatgatatgatctatgagctccttcaatatgagttatcaacaggtcatacagaggccgttttgtttttctatgacaatctttatattcttttgtttacacctcattctcaacctatgattatagaatgcttgcatcgcttgcaggaagctgtttaccgtcactacgataagcgaatgtcatttggagttggaaaccaaagccaatccctacttacaatcgctgattcatataaagaagctgttgaagctcttgaaaccatccattttaaagaccagtcgaagcttattcaattttatcagccaaaacagtttaaagaactgctgaggttgcttccagcaaacgatttacaggattactattctcaaacattagaaggtttgctgcagtacgataagaaagatcgctccatcttacttgacacgcttgaaacatatctaaattccaattgccaaatctcagagactgctaagcagttattcgttcatcggaacacggtgatctatcgaattgaaaaatgcgaagagttattaaaaagacctattcacacgtcagaggaaacccttcggctgcgcgtagcttttcaaattttttctcttgtgcatgctaattaagtataaatacaataaaaaacgcctgagtggatactcaagcgtttttattgtattgcatattctttatttcgcttttaatttagactgtacggattgtaatttcccagccatcgtatgattttctttatcacggcgatcatcaattcgtaaatttgtacatacgcgctgaataccattttcaaaaggcacctcatgcatctcttgaacaatgtttagcagcgtgcttaattccccttcaatcaatgtattcataggggttaattgatatgtaatttcatcttcatgcttggccaacactttttgaatatcagctacgtactgactcacgcttggcgtttccgtacctaccggaataatggttacatctacaatagccatgttatacactccttttatttgttccctagttatcatatcaaatcgcgcaaaaatttcctacttttacatttatggtgcatagaaaaaaggaatagttctacaactactcctttttgttacactcttataggtaacgctttgctcctaagtaacgttttgaccagtaagagttgcttagtgatgtgattgtcacgcctgttgaagaacctgcatgcatgaattgaccgtttccgatataaatgccagcatgactagctcctggttggtacgtttcaaagaaaacgatatcgccaggctgaggtgaacttacacgcgtaccagtttgatagatgctagcaactgtacgaggaagacttacacctactgcattgcgatatacatagttaaggtaaccactgcaatcaaatcctccaggcgcagctccaccccaaacataaggtgttcccataaaacgtttaccgtatgaaataacttttgaagctgagcttgagcttgtgctgcttcctgttgatgttgaaggttttgagctgctagagctgcttgaatttaatttattcagcgtatctggacccgcttctccgtctactaataaaccatttgcacgttgaaatgattttactgcacttgttgtaattgagccaaagtagcctgttacaccagctgagaagtaacctttattttttagtttttgctgaaggctgcttactgctgaacctttcataccttgacgtaaaatagttgagttgctagagctagaaccaccagttgaagcgctagaaccgccatttttcaacttgcttaacgtagccggacccgcaattccgtccacagacagtccgtttgcacgttgaaatgccattactgcattttttgtaattgaaccgaagtattgagtcgtagttcctttaaaatagcctttattctttagctgctgctgtaaagattgtacatttggtccagttgaaccaacgcgcagcaatgaacctgagctaattgatgagcttccgcttcctagcagcttattaaatgtagatggacctgcaataccatctgcagataaaccatttgcacgctgaaacgactttactgcgctagtcgtgattgaaccgtaatagtttgttgttgtaccgtatgtaaaatagcctttgttttttaatttttgctgtaattctttcacatctgaattacttgttcctgggtgcagcgtagcatctcctaaagcagcttcactaattgtaggtactactgttaaagatccacataacgctaacgaatatatcaactttttcataaaaaaaggttcctccaatgccataatctactaatctataagacgtttacattgtaacaacacattattacaaaataacatcactaatattacatttatgttacaggaaacgacagcagcgcagctgtatggtgtatattgtcgtagtttattgtcgtttaacacttaataagttcgacaaaaaagctaatatattccaatattattccttttcctacactaataataggtaaaaaatcacccgtaacattatctttatatttcaaaaaaaacaatttatttttttttgaaatgtgaaacttttttaaaatttattcgtttagcggatttgtttccctctctagtaaaacagcttttcttctaaaaatttatattatttccatattaatgaataaaaaagcgagggctgaaaaaaatagtcttgttatgtttgaaacaaggaggattattttatgagccataaaggcactcatggtacaaatgttagcggatcaggtgactcggaagacaaacgctatgcagccggagaaaacgagcagacgcttacgacgcgtcaaggtcaccccattcgtgataaccaaaattctcgaacggtaggcaacagaggacctgctactcttgaaaattaccagctgattgaaaaaatttcgcattttgatcgtgaacgtataccggaacgtgttgttcatgcccggggaacgggagctcacgggtattttgaaacgtacggaaagcttggtgacgagcccgttgaaaaatacacccgcgcaaaagttttttcaggagcaggcaaacagacgcccgtttttgtcagattttctaccgtaactcatggaaaggactctccagaaacaatgcgagacccacggggatttgctgtaaagttctacacagaagacggaaactgggacttagtaggaaataaccttaaaatattttttatccgcgatgctattaaattccctgatttgattcatgcttttaagcccgatcctgtgacaaaccgtcaagataccgagcgtatttttgattttatttctcacacccctgaggctatgcatatgattacttttttattttcaccctggggaatacctgctaactatcggcaaatgcaaggttccggtgttaatacatataagtggataaacaaagatggcgatgcgtttcttgtgaaataccattgggaaccaaaacaaggaattaaaaatttgacccaaaagcaagcagaagaaattcaagctaaaaatattagtcacgccactcaagacttgtatgaagcgattgagagcggtaactaccccgagtgggaactttgtatacaaatcatggaagatggagagcatcccgaactggattttgatccgctcgatgacacgaaaatttggcccgaagaccaatttccatttctctcagtaggtaaaatggtcctagataaaaatccaagcaacgtatttgctgaaacggagcaagtcgcatttggtactggtgtacttgtagacgggctagatttttctgatgataaaatgctgcaaggaagaacgttttcttattccgacacgcagcgtcaccgggtgggaacaaactacttgcagctgcctattaacgcgccgaaaaaacatgtagcaacaaatcaacgcgatggtcaaatggcctatcatgtagacgctgctccaggtcagaacccgcatgtgaactatgagccttcttctcttggaggtcttcaagaagcgcatgaccatccaaaacctcatcagccttatgttgaaggaaatgtaaaaaaagaaaaaattgatcgtacaaatgactttaagcaagctggtgaacgctatcgtttacttgaggactgggaacgtgatgagcttattcaaaatttagtagacggcttaaaatgttgtcaccataccgttcaaacaaagatgattgagcttttaactcaatgtgattttgactacggcaatcgcgtagcaaatggcattggtcttctgatgcatgatgatggttccctagaaattgaaatgggagcagaaatgactcctacatacgggaaattgccaaaagaaggcggttcaccgttaggaagcaacaaagctgctgatgcggtagaagaagctaatgaaaaaggacacgatgctcatccttattaacaaaaaaacatcctgcagcgacagcaggatgttttttgggttaaacgttatgaccaagtaacggcaaacacgtggtagtcattttttaactgtggcgcatcaatgggtgtcccgtgctgatatccttgtttcactcttttaggatgtaagggttgaacccattctttcacttgctgttttgtaccatttgctaaaatatatacacaatcagaaaatgccccgtcattgtttggactatcaacttttagtacttccactaacacatcttggacacacgtttttctctgaatacacataagcgtatggtagataatatcagcggacacatcgttatttaaacgaaagcccacctttttttgttcaaaaaaagacgagaatgagacgattggtaatgtctttttttgttcatacgcttgagataaaatcttgacaagaacttctccactcaagatgatccctctttctaaaaaacgcttcatcacaacatatgtgagcattgattatgctcataggataatatattatcatagtttaattctgtggtgttagtcttttttggggtttttacactgggaattatacccgcctatttcttgcgtttccctgacgttctcgctactagcaacagaattattaataaaataaatacccctacccctacaaacatatcatacaagaaatcaagcatcatactcctcctcttccttcaaaaaaacgctgttaaaaccaagcgttttaacagcgttttttcgttagataaagcctagcatattaataaatacaatgataattaaaacaggtgcaatgtatcgaatagcaagaagccataaagagaaccagcgcttcacattcgttgaaccgtgcttgaattcttcaattagcacatcttttttcattttccaaggaacaaagatggcaattaaaagagcacctagtggcataaggatattacttacaagaaaatcgaaagcgtcaaagatgctttttccaaagatcgatacgtcacttaacaaaccatacgatagcgctgaaggtattcctactatgaagattagcaagccagaaatccaagatagctttatacgcttatgctgctctcctttggctaaagaagcaacaataatttctaacatcgaaaacgcagatgtcaaagtggcaaataaaaacagcgctaaaaagaaagtttgaaacacaattccgaacggaagctgttcaaaaatagaaggcaatacaatgaataaaagacctggtccttccgtcggttttacacccattgaaaagaccgcagggaaaatggccagtcctgctagtaaagaaatcaaaatatttaacgctgaaattgaaatagccgattttggcaagttttgctgcttagatagatacgaactgtacgtaaccataactgaaacgcctacactaagggaaaagaatgcttgtcccatcgcaaacaaaatggtttgggatgtaagctttgaaaaatctggatacaaaaagaaagatacaccttccattgccccttctaatgttaaagaacgaataatgataataataaataaaataaagagagcaggcattaaaattttgtttgctttttcaataccattttgaatgcctcttgctactacaacaattgttaaaagaagaaaaacaaattgagagataacagcacgtgttggattagcaatggtcgagttaaataaactcccgtagtcacttactccattcagctgacccgtgacgcttgcaaaaatatattgcaaaatccagcctcctactacactatagaaggataataaaataaagcatgtaatcacgcctaaatacccgattcctttccatagggagccgggagcaactgcatcatatgcacgaattgcttctttttgtgtatgtctacctagtacaaattcagcaagtaaaagcggcaaaccaataattgctgtaaacaagataaacagtaaaaagaaggcccctcctccgcttgttccggctacataaggcagtttccaaatggctccgattccaattgcagaaccggcagatgccaagataaagccgagttttgatgtccattgttcgttttgactcattttttctcaccatttttctttatttattctgatttgtcatactatagcacacaacccttctgtcgaaaagggtttttgttgttttaaccctcatcatgtgttatgaatagtatgtaggtttcatgatttattttcgtaactaaaaaaagtttgacagttagaggtacaaaaaatgacaaatcagcaagtaatacagcaacaatttttagataagttccttgactttatcttagtaaaatgtccaaactgcgaactatgtgcgcgagttgtaaaactggataaaaaattgagcgggtcaacgcactcatgcacgtgtcctcactgcggttatctagacgtaaccaacgctgatagccaaggaccgttagaactttctgaagcagtagatcctttttttcagcttccgctttacttagaaacgatatgccctgaacgtcgactttgggcttataacttagatcaccttcagtatattgaatcttatattgaagttaaaacatgcggggcttgtttcgacgagctgtcggttgaacattcattgccagattgggtaattcataagcaagaagaagcattaagcgaaattcaacgtttaaaagataccgtcttttgcacattcaaatgaagatagaaaagaaacgttgccgaagaggcaacgtttctttttttacgaagaactttcttcggtaagttttcttcgatagtctccggccttatcgaactcttttgcggtgccgacgaaaaagtaggttaccgtatgatttttgttaccttgagtcgttccatgtatcatcttcccctgcttcaattgctttcgctctccattcttatttacatagaaatatttatttcttgcccagccgccgccgcttaaaagcgttttggttttcccgactccctggtcatttactttaaatacagtgtagtctccttctgtcttgctggggtttccgttatctttatcatattcgaccataacccatcctttgtacccttctggtataaggaaaatgctcggttgagacgtttcatctgggcgtccacatccagctgcgattacaatcaagaagcacaaaatgagccaccttttcactttttccaactcctttcttaataaaagacgtgcctctatactgcttttagtttttgttgaaggtgagattatattctttttgcatccctcaattttttccagttcacccagtcaaatatgctatatttacgtattgtttgtcacacactattagcaggcgtttacaatttacatgggaggataacaaaaatgagctatgtttttttatttattttgctctttgtcattccgctttacacacagcaaaaaattgttcgtgccgaccgtgaaaatacacgtacattattactaagtgaacacgagcaatctggacataaaaaaagcgattccccgtaaaacaggaatcgccttcttttaatatgttaagcttccggccacaataaggccgacggcaaccgccgctgcaaaaagagttactccaacggctacatttccttcttctacttttttggctaggctcgttttaggcgtcatgataaattcaataatccaatatgccactacttgagtaatgatacctactactccccaaagagttgcatctaccaaatttaagctgttgctccatacagtaaaaatgacaatagcaagcccaattccttttccccataacttcaaagcgaccgccacattgcctttttttatgagttcacggtcattaaattttgttgttaattcaaataccataactccgataaataataaccctaaccctaccgctacgtgagataaaaaacttcctatactagcccaatcaatccattgtgtcatttttattccccttttcattttaatccaatcggcaaatagtacgattcgttatccgtaatttgatttccagctcgtattcctactgcgcttgcttttccatttaataaaaagcacccgtacatgatatgagcctctattgtttgcgtttgagtcttcatcgttgcagttggcaaaggaataaactgttgatacacagccgtgtattcttgatatgtcttatgctgatcttcgtctattttgattccgtcttcattataaatttcaacggtatctccctcacgaccaaaggatggtttcttcacaaatgcttgttttctttcaataaatgtatcttcttctaaatacgttggtaaaaagtatgtttcaatgatgtgatgctcttctttagtgaagaaaggatgatgttgttcatgcaaagcccaaatgagtgcttgcacggctttggactgcagcaaaaatgcagaaggcggattgattatggctacttgtttttgctgtgctaatgttaaaagcatgtgtccgactttttcatgcgtactcggatcttcatcttcaattaaatgttcaagcggataagtttggcgatagagtacgtctattttttgtccatattgatcatacacgcccgcttctatatgttcaccttcttccgctgtagaggaagggacaattcgaagctgcgataatggaacgtatgtagcatctacatcggctagcttcattaaataaagagtcgttaacttatcttcttcatgcgtatcgtgcgaagaaaaaacgacgtttggatagttcgttctatcgagctcgttataagcttcaaaaatggcgtgttttaatgctaaagcaagctttttttcttcaagtttattagggttttgtacttgaaaatgccgacagactaactcatttacatgaaataattctttaatgaacgtaggcgtatccgcatttagttctaaaagcttgatttgatcagtcgtaacagcaaaatcaaggcgcgaaatcacactttctgttttcatcgttttcagtcgtaggtacggaaggctgtcttttggaaatcctaaagaaaaaagcgtctgatcatctaacgaacgaagtaaaggtgcagttttaaaaaataattccccaatttgatttgcagcttctttaatagaatcaatgatatgagaagactctatatgtacgtcataaagagcatactctgttccgtataaatcgtgccaaaaatcttcaatttctttataaaacatttctcgcttttctttatgcattaaccgccaaaaccgcctttagagccgctcccaattccagatttatacgagctgcttgatttaaatgatttataggccgatgatgaggtcaactgttttttagagccgtagtagcggcctccgtgataatatgagccgctgtgcgaagaagaagaatctgaacagtagtacgtttgggtatcttcatcccacttccacttgtcacacgatttatctttcggtttagctggtcttgcctgatcagttgaaccgcaggcaacgagcgatgtcattaaagctgtggtcaaaaccccggccatcattttttttgtttttgacattacgccttccccccttcatacgttacgcctgtttttgttacatataaactgtacacgctgcgatcttcatcaatttccgcagagtctctttcccattcccatccattgtagtatgtataaactgttccgatatagcttaatacgtccaaatgggtatgaaatgaagagacgaataaaatcggatgtcctcgaagagaattcagttcgcgtacttctaacgtaatctctctgttatcgtcttctgcttgctctttcggcccatgttcatgttcttttacataaataatatgtatatcatcttcgactgcagatgaagtttgtttatacgttactccttctttaacaaaaaattcgcattctcttcttgctaaaatttgttcaagttcaatagattgatagtgataaatagatacaaacgtatcatcaggctttagcagtcggtattctaacttccccattgtgcaactccttttgtgacttttttgtgaacgttctttaataaatacgcacagattttcaaaaagtttcaatttttctcatattaaaaggcttagctttaaataagctaaacctttatttttttatcacatctgtcacaacttcataaccgcctgtgtatgggtcgaatacatattcaagcatgccgtttccacgattgactttaaatagataacggtattttttagggctgtcttttgctggatatacgtattttcctttttggaactgacttagcaagagctgttctctttgcgcaagcattttttttgcttcattataaccatacagcgggagatttttggcatagagaaccggtacgaatacaagcacaacgactgaaatcgtaataagcccttgtttgaaccaccgtataaatctctttggatttcgcgaaagtaacatcgtgatgacaattactattaacaaaggaacaatatatacttgaacatacggaatgtttgcaaatacaggtcgattaatcaataagacaattacttcgatagctgctactaatactaaaataaaatagaccacttactcttcacacctcgacgattcaatgaattttatatgtgttagaaagtattcccactcatgaatgaactcgtctattgtatcataagacgcaaaaaaaatatctacgcttctctattttacggaattcagataataaaagagattgagacattacgaaatcaccccaatctaaagacgaacaaatgggataatgcgctagtatggccccttgttacaccgctgttgatttccgtgcaagccttcgctttccgcaggcggccgctaagcctcctcgtcgcttgcgctccaatcaacagctagaaaccactacatacatgaaactcccttcaccctaaccataaaaaaatctgaacgcatttgattctccatcaagaattaaacacgttcagatctccctttaactaagctacttttattccatcctctttattacgaaacttctacgtttcgattttgattatattttttcccttgtaacagtgagtaaatgatcgctgctgcccacacaataagtatgaatgcatatacagctatctgagttgagctgctggatatccatgtatttaagagtgttcgagcatttgttaaaatgataaacccaccaacaagtgaaccaagcaagtgagccgggataatacgaacaaaccatgcagcaatcggagccgcgataattccgccaatcataagggcgcctacccagaaccagtttacttgctcccagccaagagaaattaaaaagccaagtgtagccgagacggcaatagcaaattcacttgtatccacggttccaacgactttccgtgctgttgtgccttttttagctagcaatacaggcgttgctatcggcccccagcctcctcctcctgtagcatcagcaaatccagcaattaaccctaaaggaatggactgcttcgtcgataaaggtttggtgctcttttcttcgtttgttttaaacgtaaataaaaaacgaaataacacataaactcctagaagcaataagaatgttgaaacgtaaggccttactgcatctccaggtaaattacttagaaagcaggctcctacaaaagctccgatggagcccgggataatcagttttaacaccatcgatttatctacgtttccaaatttaatatgcgaaacacccgaagctgccgttgttacaacttctgctaagtgaacagatgcggaagccacagctggtgcaattccaaacgttaaaagcagcgtagttgatgtcaccccgtatgccattccaagtgatccatcaattaactgagctaaaaagccaataagtgcaaacgtaattaactttttcatgttgtccctccactttcatcttctgttagaaagcacaaaaaggcctccaacagttgtttgctagaagccttcggtatgtccgatcagctgtccgttttatgaataagttgtttatattgtaatcctaactattcctagaagtcaactgtgtttttagtttttcttttagtctatgtatgctgcttggttatagtatcagtaaaataaaattcttcttgttaagtcaacaacataaaaacgaccgctcacttaataagggcggtcatttttatgcatgtcttgccagtgagctagtacttcaggtggcaaactcatatctttgtctaatgacgtcacatccatagaagcgggctcatcgctatttatcactttttctacccaatctggctgcacaactaatgcttgttcaatcgtaattaaagccagccctttctcaaaagcttctgctacttctgttgccgtaagtcctcctgtacccacaagagggacccggtgattgacgtgcttaataatcgaagaaaccagtgaacgattttcttcactacttaaggtaggttcatgcaaagcactgatatgtaaatagtcaatttctgtatgaacaagacgatcaatccactcaaatgtatcttctactttatttcctaaatagcctttttctttgggcgctaatgtatatcccacaataaatggtttgcccgcatgtgctgctcgacgcgtcacttcacgaataacttcaagtgcaaaagtgaagcggttttctgcgcttccaccataagaatcgctccgttcatttgcttgccttgacataaactgctgcagtaaacattcatttcctccgtcaatttctactccatcaaacccggcttccatagctctggtggtagcttcgccaaacgcttgaaccatataagttatatcgcgctcggtcatttgaacaggctttttccctttacgtttatgaggcttttcacttgggctaatggcttgccatttatttttcatttctacgcactttcttcccccgtgtgatagttgaagaatcgctttagctcctcttctatgaatcatttgggttagttgatgaagctttcgtatgacatgatcacgatgaatgccgatttgaccatgtgctacttggccattttctgtgataaacgcggggccgacaattaccgtacttacgccccctactcgtttttcgtaaaaagtcagatcgatatcagatatttctccgttttcccgtgaagcgtatgtgaggataggtcccattgctaatcggtttttcatctcaagagcatcaacaaatttaaaatgcttaaataatttttcataggctgtcttcaattaaatcaccccttttttccttagcttgcccatctagaagccgagtagacataggcacaaaaaaagaaataccttcgccggcatttctttttacgttgtttttcttatttttttaatggggtaaaatacaaattcgctttttccgacaatccgtttttcatcaatgaggcctagaccgttgcggctatccatactgtacagacggttatcacccattacaaatacttcgtttttaggtatttgaacgggttcaaaatctcctgtaagctccatatccatgttattggcaatttgacgattcgtttttaaataaggttcacttacttttttatcatcaatataaagctgatcttttttcatttcgattttttcacctggcagaccgattactctttttacataatgcttattcttagcctcatctttaataatcacaatatctccgcggcgaatatcatggagcgaatacgacagtttattcacaaacaaacgctctccgttatgcagcgttgggttcattgaagcgccttctacaatatacggagaaaataaaaatgcgcgaatcataaatactagagcgatagcgaagataatagttttgaatatgctgcgtaattgatcgctttttgttttttccgtagtcaatatactttgtctcctttgtacagctcacttttcttatgtgaaaaagcaagaaacctcttactttaacacttattctaacttaaccatagaaagaactgaaatcaaatgttttatgttatgtaaaaaaagaacctctaacaaatgttagaggcttacattacgcaagtttcgtctttacatctcttattataacattaattatataaaaagagactaccttttatgtaaaaattatgttttttacgcaaacttaactaaatcttcacatttaaaggcgtttctccatgtataaaaagttgagagatacaatactctataatctctcttcgccgcacgagtccaataaaaatattttgatcatctacaactggtacaaaattttgttcagacgcacgtgacaaaatactttccatttcatcatgaattattttacggcctgcttcctcctcctctttcagaaaaaagcgttcttatctcctcgataagaacgctttttttagttcattttctcaatttcatttacaagaattgaaatggcatccgtttttgttgcttcacgcattgtacgcttcatcgtacttgcctgctgctgaagctcatttacttcacgcaaaaacacttcttttgttaactgttcttcttccacaaccatacagtagccttttttcttaaaggactgtgcatttaaaatttgatctccccggctttgtgcttttgacaaaggaataatcatcatcggtttatgaagggctaaaaactcaaagatagcatttgatccgccgcgtgtaatcacataatcagtggccgctagaacatctggaagctgttcatttacatattctaactgacggtagcccgactctttttcaaggcttgtatcaacattgccttttccgcacaggtgtacaatttgaaatttcttttgcagttcaggcaaggactctcgaacaatttcattgatgcgacgtgctcctaaacttccgcccataatggttaaaattgggcgcttatcataaaagcgaagccagctttccccgttcgctgcgcttccgctaaataattcttttcgaataggtgaaccaacaacctgcactttttcttttggaaaatagtttgccgcttcatcaaaagaagtgaaaattttagtggcaaatttctgcgcaattttatttgccagtcccggtgttaaatcactttcatgaatgaacacgggaatgtttagcgatttagcagccattacaacaggaactgtgacaaaaccgccttttgaaaacacaagagaaggctttaactttttcagcacgcgacgtgcatcgccaactccttttgctactcgaaatacatcttttacattttccatatctacgtatcgacgcagcttcccgcttgaaatcgcatgatatggaacgtttaattttgtaattaattctttctcaataccattgtgagaaccgacataatggatatcccatttttcactgtctaattctttcataatggcaatgtttggtgttacgtgtccagctgttccgcctccggtaaaaacgataacttgcttactcattttttcttcctctctttacttcacttaatcgatctgttttgacatcaatttttatctgatctttttagcatgcaatctgacatgtaaaacgatggttttattatagcatttttctttttacatatgtatgataaggcgtataaaagcatgctatacttttcatagggagtgatgataatgaacaaatctgcacctatagtaaaaggtgatacggtggattccgaaacgcgctgtacgcactatcatacggataaagatattattgcaataaaattttattgctgtaatacatattatccatgctatcaatgtcataatggatatgctgatcatgatattaaaaagtggccaaaagctatgtttaatgaaaaagctattctttgcggagtatgtaaacatgagctatcaattcatgaatatttaacctgtaactcgacttgccctcactgtcgttcttcttttaatcctggatgcagcctgcatggacacatttattttgaacaaaaaagctgaacaaaacattgttcagcttttaaaataactgctcatctatatttataatggaaggaagcagacctgggaacaattcctcaagttcttctaaacgcaaggaataatagtgctgcgtaccttctatacgtagtttgataattccagcttcgcgaagtactttaatatgatgtgatagcgttgattttgatacatttaatttttgataatacgaacaggtctgctcctttcttgtcgctaaacactgtacaattcgcagccggttaggatcactcaacgcgtgtaaaataggcgttaatttaatttcagatttcggtggttgataaggttttctcatgcttaaaatataacacagcttcttttgtgtatcaatgttcgataactttcgaactaaattccttgcactgttatttaatcggtgttatagtttcattgttcgatgatattcgaacttatcttcattttaatcataaattgaatgaaagattaaaaacaaaacaaataatataaagcaccatcattattaaaggaggaatcacccatgattcatttacaagcttcaatgaaagttaacccagcaaaaagagaagaatttttagaaaacgtaaaagaactaattaagcattctttacaagaagaaggaaacagcaactatcaactatttgaagatgcttttacacctaacacatttatgatgattgaagagtggaaaagcgaagaagcaattcaagcacacaataaatcagctcacttccaaagttttgtagcatttgctcaaactggcgtacttgtagcacctttagatgtaaaaacattacaaggttaatcataacttctttgaaaggatgacgcatcatgaatgaagcaattcgtacaattcaagatcatcgttctatccgtcagtatacagacgaagcagtaagtgacgagcatttagatacgattattcaatctgctcagtcagccgcttcttctattaatggacagcaagtgactattattagcgtccaagataaagaaaagaagaaaaaactttcagagcttgccggcaaccaagcgtggatcgaccaagctcctctatttttaatcttttgtgcagattttaatcgtgctaagattgcagctgaacttaacgatgccccccttggcgtaaccgatgggcttgaatcaattttagtcggggcaactgatgctggaatttctttagaagccgcaacagttgcagcagaatcactcggtttaggtacagtcccaatcggaggaattcgcagaaaaccactagaagtcattgaactgctcgatttaccggaatacgtattcccagtaagtggtcttgtggttggacatccggcagatcattctgcgaaaaagcctcgattgccacaagctgctgtgcaccatcgtgaaagctataatcacgacttaaagtcattgattcaagactatgatgctgaaatggcagagtatatgaaaaagagaacaaacggtgctgatgaccgcaactggtcacaaactgtatcagctatttataaaaccatttattatccagaagttcgagcgatgcttgaaaaacaaggatttaaattcgaataaccaaaagctgcgatgaacatcgcagcttttttatctactttaacagcgtgctgaatagactaaaagtaatactcaataaatgaggtgttgatatggagtttattttaatttgtaattttcttttaagcgcaaccgcagcgtttttattggtgccggcttttacaaaaaagcacactcttcacgtgactttactttctctccttttcctcctttcaattgttccgacttttcttctcgctaatccacatatcggcgttttaccttgggctattcgagacggtcttctattgttcgctgctttccttttcttttgtttaaccttcacttcaaacaaatggaaaacgcttttgttttttcttctatttttactgtcgattgctcctctttcctacgtcgtatatgataacttcacccatacgtatatagatgccaatattgggcttggcctaggctttttactgacatggctcttaacagctctgtacaatattttggctattcttcgattttttcgtcagaaatctcagtaaacacatcaaaagttaacaaacaaacgaatagttgattttatttagtatacgctaacaactgcacagtccttctctttacataaagctgtgtatactaaaaaaggagtgatacttgatgaaacgactattcgtaatggtagcagtgattgccttcttggcacttagccgcatgttagtatttgccgctgaaacacctcctgctgcagatgagcgaacagctcaaaatgcagaagttcgcatcgttcatgcttcaccggatgctccggctgtagacatttttgtggatgacaaagctttagtagaaggagcaaagtttaaagatgtcgccaactctttgcctttggcagccggttctcataaagtagaagtatacgaagcgaagacaaaaggaacaaaagattccatcatcgaagctacccttgttgtagacggtggaaaatcgtatacagtggccgctgtaaataaagcagaaaaccttgaactacaggctttcacgaataataagcaaggaatggatggaaaagcaagcttacgtgttgctcatttatctcctgatgctcctgcggtaaacgtaggtcctaaaggtgctgctcctttatttaaagatctgtcttttaaaagcatttcaggttatcaagtagtaaatccgggttcgtatgatctatctgtttccacggcagatggaaaagaaatactaaatcttcctggaacaaatcttcaaagtggtaaaaactatacggttctcgcagtaaatactgctgacaagcttgagaccattgttttacaagataattaattaaaaaaaacgtcatttcaattgaaatgacgttttttatagactgcgctgaatgaattcctcttttttgtactcataggtagaaatatcgttccacagtcgttttgaaagctcgtatttcataccttcatatttttttctagcacgttcgttcgagcgtaactgctccctgaaattaattcgttcgttccagtaaggtgattcactgaccgttacgtacacatgacttcttctcgcatcatgtggaatgagcttacgggcatttttagctgtcataattggagggtagtgtgcagctggaacgccttcttttaataagacaaacatctctttttccgctacatatacgtgagatttattttttaatatagcgcgcacttcatttatatcttcttcgcgtttgactccgattaaaatatcaacgattggtgaaccagccaatcctggaacggacgtgcttccaatatgttcgatgtctactgaaaaatcttttagtgtattaagcaacgcttctttttccatttgatacaaaagcgaccactttgtttcatactgaacaatctttcgcatatcagtttccaccctttcacttttttatactgtaccatgtttcaaaataaaaagaaagaattttctaactattcacttttagtttatgctacgagctttacacccgtctagacaggctttgtattattttatatatttttgttatttttattctaaatgtttcataattgtggatgtttcctcctccaaaagatagataagcttttattttctatctctcctctatcatattcacactcagctgttttatactattttacgttcttactagtagaagacatatcctcaaaatgtagatgaacaaaggattaaaggtctttaatatcgctaaattccacctttaatataattatattttacattaatgtaaaatttgtccttaaggatggcagctagttcaaattcattatacaattgaatttcgacatatagtatgatggataatatcggtattatgagataatagtagatttaactcaaaattttggactatttgccgatatatgatttgtataccaataaccttatgttgaaatttgtaatttgcaaggaggaaaaaatgaataaaaaacatgtcatgtacacagccgtttcttctgttcttttaagctcttcattgcttttgcattcaattgatgcagatgcagctgaatcggccaaagtaactgctacatcgttaaatgtacgtgcaacgcctagtacaagcggtgctatcgttggaaaaataacgaagggaaacaccgttgatatagtagatgaaagcaaaggatgggctaaaattacctataacggtaaagaagcttggatttcatctcaatacataaataaaacgcaaataaacagtacgtctaccgcaaattcgacatcgaagtcagcggtcgttaatgcgagctcattaaacgttcgctcttctgcaagcacaagcgcatccatcgtgacaaacttaccgcgaaatgcaaaagtaacggtggtaaaagaaagcgggtcttggtcccagattaaaacggcaagcggtcaaacgggctgggtggcaagtcagtacctacaagcaagctccggttcttctgcgccagataacgattctggctctacaacatcgaagtcagcggtcgttaatgccagctcattaaacgttcgttcttctgcgagcacaagcgcgtccattgtgacgaacttaccgcgcaattcgaaagtaacggtggtaaaagaaagcggatcctggtcccagattaaaacagcaagcggcaaaacaggctgggtagcaagtcagtacttacaaacaggttctggacagtcttcacaaacagcccagtcgattcaaattacaaaagcttcaaatttacgcactcagccgagcttaagtgctggaattatccgtgtagcaaaagcaggtgaaagattcaaaaaagtaaacgaaacgaatgactgggtgcaaattcagtattctgccagtcaaacagcatgggtatcaaaagggttaacagctgcggctgattctacaacttcagctagtttgccttcctcatctgctgctttaaaagataaaattattgtagtagacgctgggcacggcggatatgatcctggcacgtcaggcaagtcatcgattgagaaaaatttagcgttaacaacagcaaaacttgtggcaagccgcttagctaatgctggagcaaatgtatttatgacgcgttcaaacgatacttttatttcactgagcggacgggtgaatgttagtgaagcaaagcatgcagatgcatttatcagcattcactataacgcgtctacttcatcttctgcaaacggcatcgcatcattttattacagtgaatctaaagataaagaattagcaaaatacattcaagaaagcatggctgaaaacgcgccttctatgaaggatatgggggttcgttttggagattattatgttactcgagaaaataaccagcgggctgtacttcttgaattaggctttttcaaatgctcacgatgagcaaattgtttcttctaacgcgtatcagcagcaaatatctacaggtatttaccaagggatcgctcgatattttgcagctaataaataataaaagccctcataatgagggcttttatactaccagcttgcttttttgactcctggaatttgtcctttgtaggccaattccctaaacgcgatgcgtgacatttcaaattttctaagatagcctcgcggacgaccggtaacgcggcagcgattatttaagcgcgttggtgaagaatctctaggcaatttttttaacgcttcgtaatctcctttttccttcagctcttggcgtaattgcgcatacttcgctaccatctcttgacgtttttgttcttttaccacttttgattttttagccaaactctttgtcatcctttcgttttaataatttttatttgaaatacgtaatcattacgatttaattattttgagcaagtcactttttaaatttaatcatattttcttcattttttcaacttgtttgctttcacgcttacatgtactctacctccatgctgctgtataaacataaaaaaaattgtatgtcaaatgtaattaattcctgcatctcctatatcatacaaagagccctacatattccatattgtaggaggatttgtatttacagataatatttcaataatattacagttcatttacatattaataacttcgacaaatttagcggttatctagtatataatcatcttagaaattccaaaaataatattttgcgcactcaataaaatataaaagtaaaggtgattaaaaaatgaaatcgactggtattgtaagaaaagtagatgatttaggtcgtatcgtaattcctaaagagttaagacgtgttcttgaaatagatgtaaaagatcctgttgaaatttttgtcgaaacagatcgaattattttaaagaaatatgagccgaacggtgcttgtgcgattactggcgaagtatcttctgacaacgtaacaatcgcagatggcaaattaactttaagccgcgaaggtatggagttattacttgaagaattaaaacaacgtaatttctaataaaaagaaaagcagctgctcacatgcagctgtttttctttttgttaaagttttttcttcgctttctgatctccagatgctatactcaggagcgaatacataataaaggagcctttcatcatgacagttgaacaaattactcatcactttttagcacatcgaaatgtaactaatgaattaatcaacaaaattgaggcaggtcactatgaatacaagcctgccccgacatctatgtccgcttttgacttatctacgcatattttaacatccttttatgcatttgcatcagtggtaaaatccggtgatttatcgccacttggtcaaaaagctgattttaggggtaagtcattatcggaccttgcagctgaatatacccaaaaaacagtagacgtattacgttcacttagcgaagatgatttaaacaaaacaattgacgccactgcagcgtttggaagaaagcttcctggaagtcaacttttacaaatggccattgaccatgaaattcatcataaaggaaatttatacgtctacgtacgtgagatgggtcatacggatcttcctctatttgttcagtttggttaagttaatggttataaaatagttcgtgcttgtaagcgcccaagctagaagtttggtgcgctttttctttgcggttttcggcataataagtaagatatatggtataattctatcaataacttcatatctactattcaaagcttgtttcttcttataaaacgatagtcatcatcttttacaaaggaggaatcacttcatgagtcaaactgttaaccaacaaaaaattgctcaagtgtatcatcttccgtttgtttcttcatttggaggaagtgctatgaaccttctttctcctcaagctggcgaacatattttagatattggctgcggcactggcgaatttatttcgcagcttcataagcttcatgtccttgcaacgggcatcgattgctctgaaaatatgattgaacaagctcgtcatcagtacccaactctatcctttgaacagttaaatgcccttaaccttccttattacgaacaatttgacgcagttttttcaaatgcaactttacacgacatccgtccccctcaccttgtcattaaaaacatttacaatgctttaaaaccaaacggccgatttgtagcagaattttggggaaagggaaacatggatgaaatttttacagaaatcatccgtcaatttaaaacgtttgatatcccttataacgatggagatttcccatggtactttccttctgtagctgaatattcttctcttttggaatcacagaattttcaagtcaccacggctattcactacagccgtccctttttgttaaaaggggaaaatggcttgcgtaattggctggaaacaaatgcagcccctctttttgctcacgtgacgacagaaactaaaaatgtcctcattacgcgcttagaaaatcgaatgcaagacaaactatttcaaaatggatcttggctagcagaagctaaacatatacgtgtacatgctgtaaaacgagattaaaaaatggacgtgattctattcacgtccattttcgttaaagtgcagccaatatccttttcctcgaatcacttcgatttctaaatatgttcctatttttttgcgaacccggtaaatcagcgcattcagctcttctgctgctactagaatttctccatttgactctactcgttcaggccaaacgcttttttttaatgcttcttttgaaacaaattgattgttgtattctagaagataagctaagcacgcgtattctttatctgacagaatatacgtttcctcttttacttttactttctgcaaaattggatctaatgtgtaaaatggcttatttatttgttttagcaaaggtcctaaatcaagggttgcatccatatcatcatttctaaatactaaagttgcctcctcatttgctaaggtaatgacatcctgctctttcaataaacgaggggttccaggctgtaactcttctccgtttacttttgtcccgtgtttactaaacaagtctgtaatgaaaaaggcattgctttcgttcgttacttcaaaatgcttgcgtgaaatgtaagcactttgaaaggccagataaggctcccattcttcactgcttcgtccgataatacaggctttatcttttggaataggcacggaagctccttcataaaaaggagcaccgttccgaataatcaacataccgttcattgtttactcacactcttttttaaaattttctgactcttatcatgtaattataacactcacatttattgagatttcttccaactttggataacatcatagtatagtcagttatatgataaaggttgttgccatgtaagtaaacctttagagcagtccttttctaactgaaaaaatacgtattctttgccctgctgtaacgggaatacaatttttttgtaaaataatttggtttttagtaactttgacatatgttctctctttttaaagcggagtaaaataggaaaatacgtgaaatatttacataatggaggaagaccaatgggacgtttgccaaaagatagagaaattcaagcgattaaacgacgcgttgcactggtattgttaattattggatcatttattttaacaggtgctagctttagcatttattggtttatgatgttaaaaatataaatttttttataaaataaagaaaaaagacatggttttgttcccatgtcttttttaggtttattctttctcagacactcccgcagattcaaatgtggccatattggcaatcatcagtgaagctgagtgcagcagtggaaatgtaacagcagctccacttccctcacctaaacgaagattgaggttgaggagcggtttcttgccaagaagcttcattgcacacgcatgaccttgttcaacagattcgtgactagcaaacatatagtctcttgcttgtgtattgatttctgttgctagaagggctgcaactgtacaaataaaaccatctactaaaataggaatacggtgagcagctgccgccagcatagcacctgtcatccctgcaatttcaagaccccctattttactaataatatcaattggatcctgagggttaatgtgcctgttttgcagcgcttcttcaatcacgttcactttgtggcgcagttgttcgtcagaaatccctgtgcccattcctgcaagcttagagactttttctcctgtcaatacagctaaaatagccgtgcttgacgtagtatttccgatgcccatttctcctaaaatcaaacatttaattccttgggcaataagctcttcagcttcttcatatccgacttgaacagccagttctgcctcactgcgcgtcatcgcgtcttctttataaaaacttgctgtgcccagcttcactttgcgttgtacaaggtctttatgggaaaggtcagaagcaatgccgatgtcaatcagtttgaactgggcatctatttgctgactaaacacgttaatagctgctcctccctgtaaaaaattcagcgccatttgtgccgttacatcttgcggataagctgaaactccttcttttacaattccatgatcgcctgcaaaaacgaggactcctggcggcgtgactgtcggaaaaacttccccggtcatggccgctaattccactgctatttcttcgagtcttccaaggcttcctatcggtttggttaatgtatcaatatagcgtgccgctttttcaccagcgcttgtttgaagcgctggaatataaatgtttatcatatgtacagctcctttatttcagcaaatgtctaccgtttaatttaacaggattttgtttattctggctagtcttttttaaagtagataattggatagagttcccaagacttagttatactagtaagagttgcgtataggcagtattttgaaaggaaagattttatgacaacgaaacagcacaaaaaggaaaaggcaggtcggctcatttatcgctatattatgatgttaattggggcttccttggctgccgtttctatcgaattatttttagtcccaaattctgtaattgatggcggtattatcggtatttctctaattttagtgtacttaacgaaattgccgttcagtcttcttatcatcatctttaatctcccttttttatatagtggatacaaacaaattggtcgtaacttctgcttttcatctatgtttgcagttgttgctttatccattgtagaatctcagttgcaccatgttccagctgtaacatctgaaccgcttcttgctactgtatttggcggactgctgttaggagcaggtgtaggaacggtcattcgtcacggtggagcgttagacggaactgagattttaggtattttattaacaaaaaaaatcccgttttctgtgggcgaatttgtgatgtttttaaatatcttcattttcgcttgggcagggtttgtgctagggtgggaacaggctatgtactcgatccttacgtactatattgcttctaaaacaatcgatgcgattattcaagggcttgatgaaacaaaagcagcttttatagtttcaaatcactatgaagagctatcagacgctattacacatcgtttaggccgcggcgtgacgaaactgtatggtaaaggcggatttgaaggtacagaaaaagaagtcatatacgtagttgtgacgcgtttggaaattaccaagcttaaaaccattatttccgaaatagatccacatgcctttacaaccattatggatacccaagaagcgcagggcggcaaattcaaatcagccatccactaactatacataagtgtggatttccctgagcatgctaatagctgactacccgtaaaggagctcaccacaatgaaagaacaaatgtccaacttatttcaccaattaaaacagtcggtttccgatgtatcggataagttatatgacaaagtacacacgctgcaatcatcaccaggagtgagtgtgtttgaactgtacgaatggattaaagaaaacccaagcacaagtgtacaaaagcaaacgctgctcgggatttcgtactctttctatacactctacgcagacggcgtttttttctatatggaaacgaaatatgattatttactttacatgactatttatagtccaacacatcattatttcacttatcattcttacagagattctttatcaacagtgactcccttgacgtttcctattactaaataataaaaagctcctcaatcgaggagctttctttatatgattatcttccttttcggactttaaagataaacagcgcaagtaaaaaaccgctcgtcgcagttactattttccacgcgtttaagattggattttttttcaaggtcctgctccttccttgcggctatactaaaaataggatggccgcctttcaaacagctagtccaacttccccctactattgataccatcatctaacatatagcccaccgacattttcatcaatttcacttttcatactataacatatttttgccatttagtagaagtcttaaaagtaaaagctgcacttctcttaaaaaaaacggtattgaacccctgcattttctttaccgttcattttttgataaaggttttgagccactttattttcactgctgcactcagcggtcatccctgcaaactcatacttttgagaataggccaggcagatcttaaacaaacgttcaccaattttatttcctctgtttaaaggagatacgtacaagtcttttaagatggctgtttctttaaaataataggtgctccacgataggtacaccgtcgcaaaacctactagtttcccttccaattcagcaacaaactggataccataggaaggattattcaataagcgcttaatatgtaaagttaaagctttccgggaaggggcaggctgctcacagaattttactatatattcttgcattaacgtagccagtcgctctcgatcagtttcaaccgcctgtcgaatgacaaccatttaatcactccttttagctcaacgctcttaacataattcgatagccatactctttttcctttcgttttcgtgaaaagctccctacttttacacaagggatatttaaagcaaacaaccttatacggcttatggttgatgagagaaaatacgatgttttaaaaaaaggttgcaaatagcaaccttttttagttagcaagcgcataatttcgcaagaataaacctacacagccgctgattacaatcagtcctcctgctgttagaaacgccgccgttacatttagcgaagcaacagctccaagcagtagcaccgaaagcccaaacgtcacatatgaaacgctaagcgtagcggaaagtaccttagaaagcttttctaaaggaacggctgtttgtgtaagcgtgtaagaacatgtagcgcttatttgaagggcaatgccaatagcaaaactaagtaaaagtgaaagaaaaggagcaggcatcactccgaacaataatgtaaagaaacctgataaaagactgcctagtgttacgatatgataaagacttttctcttgttcaactgaaatcttcaacaaaacgaaacctccaagaaccgttccaacaaaaaaactgctgttgatatatccccaccaagcttcatttttatttaatatctctttcacaaacacgtagacaattgctgatgcccaaacgccggcagccatcccttctaaaacctccatgactaataaaacccgcaggcgcggataatgccaaattagcttccatccctcttttaacccttgtttttgcttcgttttagaagaatgagcgttaatgcgaatagcctgcataaatacgattgacaaactgaataacgaaaatgacagccataaaaggccagtagcatcccagctaatgatcagaaagcttccaagcggataggctgcaatttgaatcatttgatcagtgacattaaacatactgttccatttcaacagcttctctttatctactaaatgaggaagcatagagctttgaaccggagctgcccacccatcgaaaaaagcaataagcgccacgcagcacagcatgctaataagcgacatatgccccaagaaaaacatagataaaacactggtttttaacagttgagacacaacaagaatacgcttagccctgtagcgatctataagaaaaggcacaataaaactgctcaaaaacttagcagtcgtaatggtaaatggaatgcatgaaagcagcacaggagaactattttgagcataaagaatgctgattaacgcaacaatatataatacatctgctaaattggcttgactttggccaaaccataaaaaaagtacggaacgatttttcacgacaatccctctttctttttagtatgactgaaaagaaagagaatcctacacgtaatcaaccccttttatatagcggcgtgcttttatcgacttattacaatcgtatgctttttgcagaacgaaacttttttatatagtaaaaaatacaaacagttaaacagtatcgtaaaaaatcaagaaattgtcgtgaaaacgaagttagattaactatagaatatcagagttatagaatcaatactttttacataattttctttttcttcttcttcacttctaaataacctaagcttgccatatacatagagggacgagtactcctattaaaatttaacgtatagggtgaggaatattttttcgagagtggtttcgatttgctgtggcagcttattaattggactagggctaaacggatttattgctccgtatcacttactagacggtggacttataggatttgggcttatcgtatactatgtgtttggaactcctatcggactgtccattttctttttgaatgtacctgtctatttatatgctttttttcgtcatcgtcaaaactttttttacggaagtataggtttatttgtttctttttttatgacagaatggctgtctattctcgaaggtacgctagagcttcctttgctctttagctcattgcttggaggcgcactcgtagggatgggaataggactgatgcttcgctacggcatcagctcggatgggcttgatttaattgccattattgtatcgaaaaaatggaaaatcaatataggaataaccatttttatcttagacagtacgattatgatagtgggcttacatattatcggatttactgctttttgctactccatgcttgttattacgatgagcagcataatgattatgctttttacttctccgcgatggctgtcttcataaaaaaacgctggaatttccagcgtttttttatctgtttccgactatcatattgatgtgattgtggagaaccgtaatcgttgaaggtgtcgtcgtttctttttccccatcacaatctaccgttttttcaggagtagtttcaatatgaacttcttttgcacgaaaatgcataaggttgctttcagggttaagctgttcctcatcagggcttgtttgtaaccatgccataaccggctcgattcccatttctttaataacgaatacatctaataatccgtcttgaaatgagctgtttcctagcatagcgcgagttcctcctaaaaaagggccatttccaattaacaccataacagcttctccttcataggaagctttttcgctcgtcatttttaattgaaaaggctctgcttgatttaaagttctgcctacgctcatgtagtaagagagcttaccaaacttctctttattttcttccaaaatattttcagatacatcagctacgagaccgattccccaaaagtttaaaaaataatcttcgccatgttttccaacatccactgcctccgtctgcttttctataatttgctccaccgcttttaaaggattttgattcattccaattgcacgcgaaaagtcgttgcacgttccaccaggtaaaatagcaaatacaggacgttgctgcaacggagcaagagcgttgatgagctcataaattgtcccgtctcctcctgctccaataatgacatccgctttgccttccaatttccttaccagatcggcaccatctccaggttgctctgttttatataaagtaaccgtctcaaatacagtgtttaaccgatcacatataaagtcaatttcatttactaattttttgtttcctgcgtttggattcaaaatcactgctgccttcatctttctctctcctctattcatatcttccgtttcactttttttccctttctttttaaaaaacaaaccttttcaaatatgaacgttttatgaaaccattccaataggactttttttactttcaaaacctgctataataattttcggacttgtattaacaaaagatggttattgagaggagctttctatacgtgtcaataaaatgcatgacgcagctatttgcaagttgttttgtttttttactttcctcagtcgctacttggtataacggctcttcgatgcttgaaggacctatatcagccagtttgaccggagggctaacaaagtcctcggcggttcatcactattctcacatcgattatttgttatatacaattaaattccaccctcagtttccaattatgatgatggtgagcggaatttatttgattgtattactatctattattggcttcaaaaagcggtatggattgattagctcctgctgtttatgtatcacagctctcttatgctacagcagctataaactttcacatacccctaccgaaggtgagcacgccatgattacctctagcttagctgcagcaagtttatgcttagcagtcggattattctatttattaaagcgattttattctcaaaaagaatatatttaaccatatgaaaaaaacgtcggatctaccgacgttttttatgtgaaatcagttgtatttattgattttgttcaactggcgtataacctatatacgcagactgaggtcggtaaatacgattgttttctgactgctctacgacatgagctgtccagccaactacacggcttgctgtgaaggttggggtgaatagttcagacggaagctcaaccgctttcataaccgctgcagcgaaatattctacattagtataaatgcctctacccggcttgtattcattgagtaattcaatggttttatcttcaattttaacaattaaatcaaatagcccgttatctcctgagatttgtttcgatacttcttttaatgcttctgctcttggatcatgtgtacgataaacgcgatgaccaaatcccatgattttctctttattatctaattttttacgaacccaaggctcaatattctcttcacttccaatttcatcaaacatggtaataacaccagaaggagctcctccgtgaagcggacctttcatcgcgccaattgctccgcaaatagctgaaaccatgtcagattcggtagatgaaataacgcgtgatgagaaggtcgaggcgttcatcccatgctcaattgtcaaaacaaaatatgcgttcagcgcagtaaccaaactttgatctggaatttctccgttaatcatgtataaatagtttgctacatgatccaaatgctcgttaggctctaccacttctaaatcattcattttacgataccaataggcaataatggtaggtgtgaccgctgtaatcgcaagtgcctgctcctttgtcggaggccagctgtatgaagggtctcctaaagctgagatacatgtgcgaagcgcgctcatcacttctgtatcttttggcaaacagtccattaatgcaacaatattagccggaagcgtacgatgagtcgccattttttgtttaaatgcttttaactcatcatgatttggcagcgtgccgttccaaattaaataagaaacttcttcaaaagaataattgatcgccaaatcttttgcccaatatccgcgataaatcagctgacctttctctccatcaacatgccctacttttgtttcagctgcaacgattccttctaatcctttaacgtatgtcatctcaaccactcccccaattatttttaacaaaccggcccttttttctatgtacggctcgtttgcagaatgaatagactcaccttagtggtgcactataccattttattcctctttcttaattgtcagaacagtatacaaaatgaacatttcaacacgtgttatttctgcgctcgcggctttgttttacgggagaaaaaaatatttttctaggatttttttcgagggtacttttttgttaacgcttacaaatatgcgggtttctaacgtatttagaggaatttgatgtgctatttttggatgaatcactattcacttccttatgtaagagtttacatttatttgaatcataagtaaaatagataaatagaataaatagtatgaaaactaagaatactagtgaggagaatttatggatattcgagaactgcaacatttcatggaagtagttaatcaaaaaagtttcacgaaagcagcagctgcaattcacttgtctcagccagcattaagtaaaattgtaaaaaaactagaagaagaactcggcgtagatctttttgatcgctctactcgaaagctgacgttaaccgatgcaggacagattgtgtatgggcaaagccaaaagctggtatccactcttcacgagctgcatgctctgttagatgatttacgaaatctccctacaggagatattaaagtaggaattcctcctttagtagggactgttgttttcccgatgattgcaaaaaactttacatcaaaacatcctcaggtgaaattagagcttgtggagcttggcgcaaagcgaattgtcgaacttgtagaaaacgaacaagtagaccttggcattatcgtgttgcctattcaaaatcctctttttcacgtctatccgtttattgaagaagagtttaatttatacattcatcatgagcatccgctggcagctaaatcaatcgttgctttgagcgagcttagagaagaaccgtttgtcctgttcagcaaagatttctctcttcatgatcgcattattcacgagtgcattcaagcgggttttcatccgaaaatagcatatgaaagttcgcaatgggatttgattattgaactagtcgcttctgaattaggtattgcaattttaccaaagtccgtgtttccaaagatcaataacccttttattaaaagtattccaattgccgcacctactccaatgtgggagcttggcatcattttgaaaaaagatcgctatatgtcatatgctacacgggagcttttatccttcctagtagaccaagatatcattttaccgtctcatacgatgtcagcaaactcttaacaaaaaagcctcttctttcattaggaagaggcttttagtcatcttttatatctttcttcaatttttttgtcttgcgatcaactaaaaacaagtcagcaaatggcgacttgttttacagctgctttttgaatagcacacttttttttaaatgtactcccaaagcttcacgattggccataaacactcctattaaaataagaaggcctccgccaataatagaaggcgtgatagcttcatttaagactacatagccgattaacaccgcgattaaaggagatacatacaaccaagtagatggaaaaatgggatttgtttgggcgatgagccaataatataagccgtgtccagcaattgaaccaacaaaaattaaatatacaatagaccatactgcgttccgaggcataatagttgaaacatgggtttgctctgtacataaagatagcaccagcagaaatattcccccgtaaaacatttgaataccgttaattaaaaatggtgacacttcttttagttcatttaacaaagctttcgaataattgctgcctataccgtaaaatacctctcctattatgataatgatacaccctaacgtccacgaataagacatagtggctgtcacatttggaagtgaaatgcaaataacaccggtaaaagccagaagcaaagcgaataactgctctttttttaattccatttttctttgcatcacttgaataagcaatatcatcatggggccagtagcagataaaacagctgcaagacccgatgtcacatgttgttctgcccaatagagcgttgaaaatgtcataaaggtcaaacaaaaccctaccatcatcactttttttgaaaataataacgagcgtcgaacgtcttttttatatgcaaagtacgagattactaagattcctgctaaaagaaaccgagttccagctgagaaaagtggaggcattcctgcttcaatccctaatttaatagttaaaaatgtcgtgccgaaaataaaacagataagtacgtaattaataataatcatatatcttcctcctttaaatatgccacgagtataaaagaaaggaagtataacagtaaaaccttgactataacagttgctattttttcagttgcgcccatgcttattttgaggttaactaaagaaaaagaatagttaggtgacacaataagatttaatgtacataaaaaatcttctacccccatttatcagcaaatctatgagcagattcgttatcgcatccaaacgagcatgataaaacctggtgatcagctcccttctttacgaaagctatcacaagagttagaaataagcttattaacggtacgaaaagcgtatcagctcttacaaaaatcaggattaatcgtaatacagtcaggaaaaggagcttttgttagaggggttactaaacgttcttccaaggtattaaataatttttcatggcaagatgaattaaacgtaaatatcacgcgctctcagtacagcttaaatcgtgatcgtaaatattatgatttctctcaggctattcttttccctcgcctccttcctaatcagtttttagcgcaagaaatgcaaagtctgttacgtaccaatgagcttgttttagccacatacggtccaattcaaggagatcgggagcttcgcatggagctttcttcttatttacagagagagcaaggaataaaagctgagcctcatgaaattatgattacaagtggcgctcagcaaggtattgatttaattgctcaaacgcttttaaagccaggggatacggttatagtagagagtccatgctacggagctgcaattgatgtcttcaccaataaaggtgttaacgtcatttcaattgaactagatgaagaaggaatacaatctgatttagtagaagaagtctgccaaaaaataaaaccttcgcttttgtacgtgaacccttcttttcaaaaccctacaggtatactaatgagcagacagcgtcgcaaagaactagttgatttggccgaattgtatcacttttttattgttgaagatgattcgtttggagagatttatttcgatgatatatcggtgcctccaccgatcaaaacgtttgataaaaatgggcatgttttgttcttgaaggggtttagtaaaacgttggctccaggacttcgaataggattactttatgcacaaggttctgtatttgattggctatatgcggttaaagcactgatggatattggtagtcccttattaactcaaaaagccgtgctagcttttttgcgcactgagcgaatgaaacatcacatggaaaaactgaggaccgctttgcaactgagaagagatcatgcaagcgatctgctttcgtctctttccgaatccgttcaattccaagttcctaaaggaggattcaacttatggttaaaactgcctcaaaaagtaaacacatttgggttattaaaaaaagcccaggagcacaatatctgctttttacctggtgaagcttgttttgttcacaaaccgcttcatgcttacattcgaataagttattccctccttagtgatactgatttgaacacaggacttcaacgtcttaacaccattctttcagctgaaatataaaaagattctttaatagatgtttaattataagaagagaagtgtatacagaaagaggagaagaataactttcttctcctccactcttttaactcacatttttattcacagcaataatttcactcaggttattcatataaataatttggtcaccaaacgttctatttttcaaagcagccgtatggtgcggcttcatgccaataatatagcatgtgatacccatgagataaaaggactgcataaagcctgcaaaagcttggattccttcggtcgttaatatatctagtcctccaaagtcaaatagaagcgtggtgtaatttccttcatgtgcaaagttttgcaaaatggacgtattttcagctacaagatctgtatctaagtctccaaaaagaggtataagtcctactttagaggataatttaataaaagaagcggacaattgcttgattttctgtaatgatttttcaagacgttctttttgttcaagcagttcaaaatctgtatctgctaatcgtttccgatggtcttgaacaagactcgttagctcttgtatacgttcatcttggcgaatacaaactaaatgacctatatcgctatcccattgaattaagcattcaaacagtgaataaggagaatcattggtttgcatcacgagctctactttctgaatagcctggcctcggctttggacaagcgtttgctcatcatggggttcgtctacagacaattctcgagaatctgtttggcgcaagcttaaaaactttctcgccttttcttgactaaatacgtctacaagatctaaaaaattagctgaaggcttaaataaatgacctgattgttgcgaccattccaaaatattaaattcagtatccactaaaaagtaaggaattggaacatattcaagcatcgacattaacttccactcctttgtgataactgagtaaccagttatttagttggtaaagatccggaattaggcgtgtatgctcagaacagtaagaacggaaatcaatttgagaaactaaacgccctcctaccattaccgttggtcttggttctaatttgtccaaagttttggtatattcagcaagcctctcaatatgataagggatgctgacagataatcctaccatgtgcggcttccattctatagccattttctcagcgtattccagagggagattggcccctaaaaagcgagtattccaaccatgttcctcaaacaataaagccaccatctttaaaccaatgaagtgctgttcttgttccaagcatagaagcagtgcccttggagcggtgtctgaagcgtgtccctgaatttttttataaaagcgatagcgagttagcacataatcacatgtcgtagttgcaacatgctcatcagctacagaaatgatattttcttcccacatatctccagttactcgcattgcggttgtaattaaattttcataaatatctaggctgttctttccctgttggatttcttccagcacaatttcccaagcgctgtcttgatcaccagctaataaatagcctacaaatttttgtacttgagatttcattgtttcacctcagtaaacgtaaagcttttaagaaacttgaataaaagcttctcgtctctctttttcaagatcgcctaaaatgtataccatttttagactaacacatgttgccaatagcaacaacataaaaatagaataataactttttattttactacactcagtaaaatatgactagtatttctctaaatattctcctttcccttttatttatgaaaaacacctcggcattttgtaccgaggtgtttttcaagttgttatcatttcgtcggctaaaagaatgtaagtgcgtctctttttcttttatgcatctttccttttttccactttcaatagactttcaaacatatgtatttatgactcttctgctccgaccataatactgataagatagagcgctgccataactgagccgattgtattgcatatcaaatgaatatattggctggtcgctataaacaagtacaagcttagcgacagcagcaccgttccgaacaaaaaagaccatttaaataatgacagtggccggttaaactttagacgcaaacaaaaaatgagaataaagcctactagcgccatcacaaagaaactaacattaaataaattgatagttatcacgtttgttcacactccctttgcccctgaaactattataacatatttttccttatcttcattctttctctaggagcgaacgcgtcgaaaattgtttttttaatgtgtttatgtcacaatatttttataaaaattccaaggaatgagggaatgcattgactacacctgaagctcaagattcaaaatggtccattttaaataaagcccttcatagctcacaatctggcattatcgtgacagacccttctttgcctgataacccaattatttacctcaatcaagggttttctcttatgaccggctatgaggaagaagaagtattaggagaaaattgccgttttctacaagggcctcttacaaacctgcaccacattgatgaaattcgcagcgctattagccgcaatcaatcagtttctgttacgctcgttaattatcgaaaagacggctctttctttcataaccagctaacgattgacccgacatatatagaagaagaagataaatactactttattggtgttcaaaaagatgtaacaatagagattacagcccaggaacagctacagcaagctttagaagaagttgaaaggctatccacccctatcgtgccaatagaggaaggaatctctgttcttccattaatcggaacgttaaacgaacggcgtatagaaatgctatttaatagcttcacctcgcgtaacacaagcagcaaagatcgttatttaatcctagatgtctcagggttagctcgatttaatgattcattcggccgtgatattcttaatatttacaattggctgaagctcatgggaactcagcttgttttaacaggaatttctcctgacatggccatacatatgagcactatggaagatgatatgtcctttattttagtctatcaaagcattaaagatgccttacccaagctaaagctataagcacaagaagtgtttctttgtgaaaaataggtaaaatgcatgaatatggtagttaataaatgttcattttttaataaattgggtttgagagtatacagttagggaaaacaaggcgtataggaaaataaatgcgcttcataatggatttatttataagcatcctcactctagatcaggggatgcttttatgcttttatttataaatcaattagactatacatatataaggagagtcttcatgcataaaaatcaggacttatatcattttttcaaagaacattctcttcaattaactgaagactggtacaatcagctcgacgatgaaaatgagttctctgtctattcgagtaaaaatccagcaattgtgaaagaactgaagcagcaaaatcaagattattttcagcatttatttgacgtgtttataaaggatgaggagtattttttttcagattttcagcagtggtcgatagaactagcgcgtgatccaaagcatttaagtacgcctcttcactttattattcgagaatattttaattcacaaaaaattgccgtcaattacttaaagaagtttatctctttgcattcgaatgaagtaagcgcagataagatatttatgtggtatgacattattgttaaagcttttgatctatctatttatatctttattcaagaatatcataaaaatacgcaagaacagctgaacgctcagaaagagttaattaatgaattaagttctcctgtgatcatgcttcaaaataaagttgcacttctgcctcttgtgggggatattggaacggtcaaaagtcagtttattttagaaaacacgcttcagcaatgctcgaaaaaagacgttgaacatttatgtattgacctgctcggtgtagctacaattgatacgatgatggcacaagagatttttaatttggtaaaagctcttcgtttaattggtgtgcaaacaattttatctggaattcgaccggaaatttctcaaactgccattcgcttagggctttcatttgaacatgttaaaactacttcttctcttgcacaagcacttaattctattggttaagcatatggctctctattacagcatagagagccatatctatggtgtttcaaattttactggagtgtaatagacacgcccgattagcttttttcctttgctatctttccaatctgctacgagtatataccgatcactgcgagaggcagaatctactgtaatagcagatgttttttttatgtcctttttttctactatgttttcataaatagactgattacgaatttgtttgtaataaagggcattaggttttttaccatctattttaatggacacttgaccaccttcagagacgggaatactatctttcataacaatttgtctaaaattttttcgttcgccaaaatcagcttcacattcggtccagcaaaagaataagggcttgatgatggcttctttgccttcggctattatttttatagcgggtggataagaatcttcaagcgtttcagctgtaggaatctgacatgcggctaatgaaaacaaactaaataggataatcaccactttcttcatactatgtcctcccttttttgtaaacgtggtgcacgtaaccgagtgggtacataatatactctttcgcctgcaaccaaaagattccttttataatcaacaaaaaaacagctgcctatttgtttagacagctgttctgttctattctatttacttagcatgcttatttcttttttcatatctttttctacatattccattaaatcagatacataggtttgaagtggttttgttgcgtctttgtgatcattcatcgttaattcatagatgctatcgatattatcaatcatcagttccatatcatcgatgacgcccgtatgcttatacatcgttttcatcgtaggatcaagggaagctaattcattatattcatagtttatagtatttgaaatatcatcgagttcattgataaattgctttttggtttttttttcggccataagctgattatactctttaaaagcagtttgaaggtttttctgagaggcagtcaatactttcagctgttctcgtcctaaataataatcataaatactagtaacagtaaaatatcccccaaatgtgagcgcgattccgacaaccaaacctatccaaaacgtgctcgttttaaaaaaatgtttcataatgactccttttatctgtgttctatgtacaacactagctcatgctgctgctttttcctaggatacaccaaaaacgaagtggaagctacacttttttaaaaatttgtcgaaatttgtctcttttctcacaaaccgcagcacattatgttccatctctatttctccatctatatacatcaaattcgttaaccgctgtaaaaccaattttttcataagttggctttcctgcacttgtagcatgcaaaatacacgtatccgcctgtttttttgcttcagtaatagcttccttcaaatatgcggtggccaggcctcttctcctcatatgtctagctgtagtgatacaatacaaacccgctgtaccgtcataaaaaaagagagacccagctacagctggccggttgtgataaaggcccagatataactgatattggtcagcgtgctgcataagctccctaaacctttcaaaaaattcagcttgatattcttttggtttttgatagccgtctatatataccgtgatccattctttcagttcagcttctgtgcgcactcgcttacattgaaacccttctactcctgtatgtatgtattctttttcttgaatgtgctgaatcattccgatccatttttcataaggaacaaatccatttttatgaagaactggaccaaggttatcatatgaagatggaccaaaaatccatagaggttcctccccttgcggagggcatatccccaacgcaggctcaatatgacgggttcctgcatatatgccccgattgtaaggagatgcagaaatccatttaatttctgatgtatccaccttcacagatttcttcgtatgctgaaaatacatccaatgctgaatcaagtgctgttctactacctcgctttgattttttattttcacttcatgtctcctttctcttctaaactatgttcctttttctattatatactagttagtctattttctatgaccctatcgcagttcttaaatccttttacaagttttttttatttttttgctattccatgaatagttttcttttaagtggggtattaacctatataagcaatacatcattaaaaaggaggatgatatttatgtcatttttatgggcacttattgtaggtggtattattgggtggcttgccggattaattacgggaagagacgttccgggaggtattattggtaacattattgccggctttatcggttcttggttaggttcagctatctttggaagcttcggaccggttgtaggtggatttgctattattcctgctattattggatcaatcatcttagtgttaatcgtaagtttcattatgagaaaaatgcgtggcagtcataaacatgcctaataaattattatattagaaaaagaacctctgttaaaaaagaggttctttttttatatgaaaaattcttaaaatttactatttttaatttcataatattgaaaaataaacctattaatgttaatttaaccataatcactatagaaaaaagaggaattaacatgctgctttcaacccactcaaaagacaaatccatgtaccaaatactaatagaagaaatcgaacagacacgaacgttaatgattcaaacggctgtccgtgaaggaatgacaagtcctaacacacttcaagttagtcaatcattagatgctttattaaataagcttcaaattttcttctaccaataaaagcccatgatatggttacatactcatgggcttttgtgttgtattagtccgcttgattaacgtgttccactgcttggtgaaggctactgaaagtcgtaatgtcagccaaatctaaccctaagttcaccatcgtctgagcaatttcagcccgaatcccgcttaaaaccacttgaattcctaataatcttaaagcaccgattactttaaaaatttggtccgctaccatcgtatcaataattggaaccgcgtataaatcaataatcaaccaatttagcttgtagtcgctgccgtgttgaagcgcattttccattagaatttgagcgcgatttgtatctaaatcgccaacaagaggaatcacgccaatttctttcgtaatgcgtaccacaggaattgaaagttcatcaattgcatagcgagccgattggattttgtttgcaaagtcggtcatatatgatttactaacccagtgtacggccttatctactactacgttgaaacgagaaataacttgatagaaggcatcaaacgtaaacgtttcagcttttgcttcttctttaataatttccccgataagatttcggtaatagctgatttcttctaatgctacatccaacggaagctgaaggacaacgagtaaattcgctacttctcttccccactcctcaagcacttcaaagttttttgtatcatttgttgagacagaatcagcatatatttgaattaaatgaacgcgccacggttctaactgttgttgaatatctttttcttcataatttttttgttttgagaactcttcttttttttctagaattaaattcgtaatgtgtttaagctttttatctaataataatgactccatattgttctcccgttaagaatttgtttaattaaaatgatatcacaaataccgttaaaaaaagtaaaactaagggaaaaagctttaaaaaatgaaccggatgtccctttttgcgaatagaatgagctaaattgaatctaaaacgtacataagctgaacttctctccttccttttatcgttactttcacagtgaattctcatacataactcttcagtttaatgttgggctatcttagcatatatgataaatagatgaaaaaatgtaaacgggtttgcagcaagcatgtcgcatgacaggatgtgttttaggaaagaatgaaaaggaattccctataaaaaggaggttaggtatatgtcatttatttggacgcttattgttggaggacttatcggctggcttgctggtgtgttaacgggacgagatgttccaggtggaattatcggaaacatcattgctggtttcattggagcatggttaggctctctaatttttggagatttcggtccagagatcggcggattcgcaattgttcctgctattattggtgctgttattttagtcttaattgtgagttttgttttacgcaaaatgcgcggaaataacaatcatcgacatgcctgaatgaaaaagagaaatcagcgtcttgatttctcttttttccttacttcttgtagtaaaatattttaacaatgacctacctgtaagtgtaattctttattgctacatttaataattgcggcttgtcacctctcacatttgatacttctacaccctcatatcaagcgcgttagtaatgagcagctctggaccttcaagatcatcaagcatatcggtgaagatagcttcgatatgaacaagtgaagttttagctttcattggacattgttgtatagctgctttctatttcggctctactaattcaataaatgatcgtgcttgtttgccctttaactgtgcgtagtgtgtatctgtagctaattcaacggtttcgttttctaagttgacccacatgcgataagattgtacctttatatccttttttgtttccaccggttcaaagtgaagaatgtagttaggttttcgaatcatttcagctttttcttctctccatgatacatcttttaaccactgctgcactttctgcacttgattttggtctttcattttaaccgcatggccatattgattatcggctatgtatttttcgattacgagcttttgttcaacagtaccgcttgaagcactgctttgctgacatcctgttatcacccaacaaatagcaatgagaacaactaatccagaccatacttttttcatttacatctacctttctttgtgtaattgaaatgagatgttcttgctgaatgatgctaccagctgctcgtttttaaatctctttttgcattctcctttcttcatctaaatccctgcttcatttgctcaaaaaaactgaatccccgaaaggatccagtttttcgttacgattcgacatcttctatgacatgaacagcgcgaatagcagcgtttacttttgtatgttgaatgcgctcagtcattcagcaaatgtctttataaaaaaacggcttccttatggaagccgttttttttactgacgatcaaacaatgaacttcctgcaataccagggttcgtcatttcaaatggatttaaaataagatctaattcctcttctgttaacacatcgtattgaaggcaaagctcacgaattggttttcctgttaaaatcgcttcacgcgcaatacgcgatacgacttcatagcctaagtgagggttaacagctgtaataattcctacgcttttttctacatattctttcatgcgcgtttcgtttgcttcaattcctgctaaacagtgatctgtaaagcttctgaaaccgttgttcatgatgctgattgattgaagcaagttaaatacaagcacaggttccatgacgttaagctccatctgacctgcttctgaagcaagagagattgtttggtcatttcccattacttgaaacgcaatttgattgattaattcagccataaccgggtttacttttcctggcatgattgaagaaccaggctgacgagcaggaaggctgatttctcctagacctgcacgaggtccagaggccattaaacgcaggtcatttgcaattttagacatattcgtcatacagattttaagcgctgcagatacttctgtataagcatctgtattttgagtagcgtctactaaatgctctgcatgcacaagcggcagaccactgatatccgctaagtgtttgactacattttcaatatagcgaggatctgcatttaagcctgttccaacagctgtcgcccccatatttacttcatgcaagtggtcacgcgttgcgctgatacgcttaatgtcgcgcgctaacacgcggctgtatgcttcaaactcttgaccaagacgaacgggtacagcatcttgaaggtgcgtacggcccattttaattacatgatcaaattcttgcgcttttcgtttaaacacatcatgcatgtcattcattgtaacaagaagtttatttaataagttcagcgttgaaatatggatagccgttggaaatacatcatttgttgactgagacatattcacatggctgttaggacttaatttaccatattcccctttgttatttcccataatttcaagagcacggttcgcaataacttcattggcattcatattcattgacgttcctgctccgccttgaatagggtcaacaataaagtattcatgccactgacctgctaaaatctcatcagctgcttgaacaattgcatttccaataccttcatataagcgctttgtatccatatttgcaagcgctgccgctttttttacaatagcaagcgctttaatcatttcttcatgtactttataacccgtaatcggaaaattttctacggcacgtgcggtttgtacaccgtagtatacgtctgctgggatttgtttttctcctagaaaatcagcttctgtacgatatcctgctgtttcttgtttcatagctgtacctgctttcttttttaattaatatcttctgcaatcgatgtttccatcatctttttaacttggtgaggatctttggtttgtccgagcacccacattaatttaggaacaatggcttctgtgttcatgttttttgagcgaacgacgctgtcatgattaatcattcggcccacttcataaatgcccatgtcttctccttcttcaagacactgagtcgtaatgacaacggatacaccatggtttgttaactcaacaagcttggctaaaatgttgcgaacttgaaatggaatacctccacttccatagctttcaacaacaacgccttgatatacatcctttaatccatcgaaaaattcgggtttaatgccgggaaacagtttaacaaccgctacatccgtacaaagagatgtattaaccgtcaactcttctttactagagtgaacggattttgtatattccaccgtattatcatgaatagacgccacgtatggataattaatgctttcaaatgcatcatagctttttgtacgaagcttgattgctcttgtaccttgaatcacacgaccgtcaaagattacataaactccgcctgtttcttcacatgcaaagcgaatcgcatctgcaatgttgcgcttcgcgtccgttttactaaatgaaataggaatttgagatccggtaatcgcaattggttttttagaatgctgaagcatgtaagaaagagctgccgatgtgtaggccattgtatcagttccatgggtaataacaaaaccatcgtattcattataatgctcttcaatcgcttttgccatctctatccaacattctggctgcatatttgtactatcaagattcataagagatttgctgtcaatttgacagtgttcatttaaatcaggtatgtagcttagtaattgatctggctccattccaggaacaagtccattttcaccttcaagtgaagcgaccgttccaccagttgataacaataatagttttttcaaaactgacatcccctttgcttaatttttgtaaaaaaacctgacaatctatcaaataaattatattcatttcgcgtacttcacctgtaattatagtaaccaaaaatcaataaatcaagagaaaaattattcgtttcgcgtacacttttctctgcagcaatgatataatgaataaaaatgtaaattagctcacggtttgattacaaagatctgcgcgcgagctgaatgcctcggttttttacatactacacctacaaaggagcgtcatgaatgttaagcagattagctcaactcaggaaagaaaaaaaatggtctcttcaatatacagctgaccagcttgaaattgctaaaagcacctacgcaggatacgaatctggctatcgtcgtccttctcttgaagcactcgttacaatcgcagaactatttgatacatcaacagactacttgctaggtaaggaaaaggaacctcactctctttcagatgcacccatcgaattaacatcgcctcaaactcatacgattacggtcgacggtgcggaactatctcaagaagaaattcagcagctgacggcttttattcgtgctaaaagacaaattgaaaaagaaactgcaccttcttcaatttaaagaagattagaagcagggcgcttctaatcttctagctgcatttctaaataccctactacttcttttgttatttcctcttctgtttcttccagcagctcgccggttatcttgctgcctgggagcttcctcgaagaacggataccccaaaacgtgcgtacacagtgccagataggaatgaaaagactgtctaaaaactcatctttttccaaaatacccacttgaatagtagcgtggtaaccgggctgaaaaggattttctccttcacggatcacttctacagaaatctccatcccttttttttcaaaagcttctttatattgtgcatatattgatttgagaagttcttgcatagatttttcaactgtatgtatatgttgttctaactgcggcgtaaattgttttgctgtgtattccatctatttccctcttctttccgttccctatcccttattttagcgactttcattttattgtatcataagaaaagcttttatctgtctagcagaaaaccccgcttttttatagaaaagcggggttcatacatacctttattagcaatagcctacattgctttatcttgtttagaagatgattttaatttcttatttttagttggatctggctcattagaagacatgatgatgtttccttcgccgttgcacactttgcactttatcaatccaaatttcttaccggctccttggcattgtggacaaacatatcgaattggcataaactgtaccttccttctttctaatttatacctgcgccttaaaagcgcctgtggctagtttatagttttattataagttgtacaatccaccctatcaagacgtgccaaattgcacatctttaatggcaagaaatccttcttttctaaaattcacctgaaaaatgagtcgatagacaggaaaatttcttttcttgtcaaaaggcaatacgtcagaggaagtttcttattggatataattagcgattgtttgcgctgaaaattttgcgctttttcgcgaagttataggttaaacaaccgttttatctcgaatttcttttgaaatggttacgtctttccaaagctgttcgtatttataacccgttaaactttcacaaaccgctttcgcttcaggagtaacgtctttcgctcggcctcccttttttcttctttgaatttcagttaataagattttgtgattttccggacttattttaaaccatatggttgcgataattccagcgagaatcaaaatagtaggtacaatcatgaacagcttttgcaagccggctagcgtagacgctgactgctcggcgtttggtacatagccaatatcctttaaggcaacaccaacaagaaaaatcgcaagcgcctgagaagattttcgaataaacgacatcagccctgcatacacgccttctcttctttttgtcgtaatcatttcatctacatctgatacgaacggcagtacattccatggaatcataatcgctccagaatgaccgcttcctaagaaaaatgctgctaagtaaataagaactaaagagctgtctgttgttaggaaactgaataaaacaatgcccgttccccagatgatcatgctgaagttataggttaatttatttcctaacttaatggctatgtacgtaacaagaggaataaatagcacttgtgtaatttgcacaaagcttagggtgtctgcataaatagcttcgcgcagcatgtaataggcaataaaataaaagaaaagagcattaaatacatccattgcaatgtaagatgctaagtacatggcaagatacacgttaaacgacttatttttaaatgcacttccaaaactgataaaaagctgcttaaattctaaccaaaatccgcttttcttttttcgttccactacttctccgctatcccaagttcctttatagacaaaaatccatggaagagcaaaaagaagaccaaagataatgcccatgattaaatatccttgtccacctggaaacgcatcaatgattcgttttgggaagaaagcgcctaaaaatgaagcgccttgtgaaaagaccatgcgtattcccgtcatttttgaacgaatactataatctgtcgtcatctccgctgctagcgtattgtaaggaaccatgaccataccaaacgccgtgttaaataaaagataagctaagataaaataggtgtatttgaacatatgcgagccttcaataggaatccacagcatactgaacgtgatagcaactggaatgattccaaaaagaaaaaagactcttcttcgtcctttttttgtctgaagatgatcagatatgtacccaatggttggatctaacaaagcatcccacacttttccaagagctacaatcgttcctgcttctacaggagaaagcccgactacatccgttaaaaaaaccataaataatgtgccgataataaaaaaggatcctccgccaaacaaatccccaaatccatacgctaccatattacgaaagcgcacttgttttgttttcccttgcatatgcagccctccccctgagtaaatagactagcttcctttgttattcacttttttctattttactaaactaccccttgaaaaataaggaatatgtcaccttttctactcaaaagaataagatacttcttgatcatataaatagaaaaagcgctgggtaaaccgttcttttttatactctattataagttgactttttgttcacagctgttataattcaacgcattgcttgttattcaactataaaatgcaaacttgaacatttgacatctgagctgtgacgaataaaataataagtatgaaacctattgatatctttaaagcattatctaatgaaactcgattaaatatattggagtggttaaaagaacctgaaaagcattttaaagacaaacaagcacatttgcctaaggaggtcagcagcagaggcggtgtttgcgtgggagatattcaggaaaaagctcagctgtctcagtccacagtgtctagttatctttccatgatgcaaaaagcaggtttgttagagtcaattcggcacggtcaatggacatactatcgccgaaatgaagaaacgcttcaagagctttcttcattcttacgaaaaaaactttaacgagtttttttcattcagtatatctatttttctagatatacaaatataaagaaatattggagtgataaacgtgaagttgttggtttatttggttgcggttctaggcggcgctgctttaagtatggaaggcgctattgccggagaacttggaaaaacagtggggaaacttgaaagcagttattatatttttatcatgggaacgctcattttaggtctgaccactttatttgctggaaaaggagatctaccttacgtcttaaaagcacctaagtggaatttaaccggcggtttattaggtacggtttatttaacaattctagtaattagtatcccctttattggaattggggtttcaatggttgctgttattgtgggtcaaatgattacaagcatgatcattgagcattttggttggcttggcagcagtaaaattaaaattaacaaagaacgcgtaatggctattgtatgtatgggaattgcgcttgtacttattttctaggagggttttacgatgagtttattgatggtgatacttaccttaataggaggattaacgctaagcgctcagtcttctattaacgggacactaagtaaaaaaacaggtacgtttgaaacagcttttttaacctttgcgacaggtgccatgattttaacaattgtcgttgtgttctttggtcaaggaaacattctctcggttttcgatgtccctaaatggcagcttacctgcgctttattcggagcatcttatttatttctaacggttttagctgtacctaaaattggtgtgacagcagctaatatctcaactgttatcggtcagttatttgcaagtatgattatcgaccattttggctggtttggaagcaaggaagtatcctttgatctatcccgctggattggtgtagcatttatgttattagctctttattttatttttaaaagcaataagaaaacagcagcataaaatgttcatgaaaatagccaagttcccctatgtaaaggcgcacttggctattttttgtacgtaaaccacatttgaatttttaatcaattatttagaacatattttatttaaactaaattgattttaaataaggtaaattccacaaaaaaattgtgcataccttcctgcctttgttcaaaagataaagaggcagatttagaaaatcagctacataaacgaacaggtaaggtgggttttttcgtgggaaaatttttatttttagcagcatttgtctttttttgttttacgctttccatttccgcagaagaaaatataccagaagaaaatatagaatcacacgtaagtcagcctgttgtaaaagattttatttatcaatctcttgaaccttgggtacatcaagatattacttctcattatgagaaggtttacggtaaacagcataaaaaagtaaaagttcgacctattaaaaaagatgatatcgggatacaaatgggtgaaatacagcccggcaaaggcggtaagttcactcatattgtgcgggtgaaaatcttaaacttaaaagtaaaacccgagggagaagatgaattttttgcaacggatacgcttatttataaagtgaatatcaacgaactttctgctgaaaatgatgtagaaaacgtcgtaaaactactcgagtataaacatcaagaaagataaaattccaactctccccccttttgaaggtatttattcctctattcaaaaggggctttattatgaagcgcgttttctcttcacatatttagggaatataactatcacttatcccctaattttttcatattgctagtgcataagatatgaacttgataactttttgtcggtttttatctatttttgtagggtttcctgtaggatgaaaaagaaagtaaagcgctttaattaccgtgacagaaaggttgaggatagctttcctgcataactggaaatcaataggcattaagaactgcctgtaacgacaaaagttgacaaccaaagatttcagaataataataataaagcaacaatgtttaaatgaaagacttattttacatgaaaggtgttagtcagatgaacaatttacatcgaagaatgggaacattcgcgttaaccatgacgggacttggatcaattattggttccggctggttatttggagcgtggcgagcagctcaaattgcagggccggctgctattttatcatgggtcattggaatggttgttattttatttattgcactttcttacagtgaattaggatccatgtttcccgaagccggcgggatggtcaagtatacgcagtactcacacggttcgtttattggttttatcgctgcttgggcaaactggattgcgattgtatccgttattccagtcgaagcagtagcttctgtacagtatatgagttcgtggccttggaagtgggcacagtggacaagccacctcgtagaaaaaggaacgttaactggcgaaggattagctatcgctactgtgctattgattatttactttttactgaattattggacagttggactattttccaaggccaactcgttaatcactatttttaaaattgttataccgggacttacaattggagcacttttatttgtcggctttcacggcgagaacttcacttctggaagcagcatcgcaccaaacggctgggctagtgtgctaacagctgttgctacatctggaattgtattcgcttttaacggctttcaaagccctattaatatggctggagaagcaaagaatcctgggagatctattccaattgcggttgtaggctcaattttagtggctacagtcatttatttgcttcttcaaattgcttttatcggtgcggtaaatccttctgatattgcgaagggatggagtcatttaaattttaactctccatttgcagatttagccattgcccttaacattaactggcttgtcattgtcctgtatgcagatgcgtttgtttcaccatctggaacaggtattacgtatacagctactactgctcgaatgatttatggtatggaacaaaataaatatttgccaagtgttctaggacgtcttcatcctatttatggtgttccgcgtcaagccatgttttttaacttagctgttgctcttgtctttttgtttttatttcggggctggggcgtgcttgctgaaattatttcagtcgctacgcttatttcttacattacaggtcctgttacggttatgacgctaagacgaactggaagcgatttatatcgtccccttcgtttaaaaggattaagcattattgcgccgctcggctttatttttgcttcattaacgctatattgggcacgctggccgctaactggacaagttttgtttattattttaatcggcctgcctatttatttttattatcaagcaaaggctaaatggaagggattccgccagaacttcaaaggtggcgtatggatggttgtatacttactgtgtatgatgactatttcatggcttggaagcgaaaagtttgggggccttaacgttattaaatatggatgggatatgggaattattgttgttgtttctcttctcttctacacatgggctttaaaaagcggcttcaaaacagagtatttagagaatggaagaaaagtaaatgacagcttaaaagcagcagcggctgaaacagccgcttccaaagagtcataacaaaagcaccttgcatgagcaaggtgctttttagtgagcagttttaacttttttcagcacgtcttcgatcgtaatttgatctaaatgcctaattacactttgctcactctctgtaaaaatgtcgtccatcactgtctgaatgtttgatttgacaatacagtcagcgtcagggtcgccgctgcaccagtgaggctttagcgttcctgtcgatataactcggtaaatcaccccaagacttatttcagcagggctgcagcctaaagtataaccgccgcctagcccttcttttgtccgaaccaagttgttttttctgagtgtactcattattttccgaacccgtgcaggattggtacagatattataagcaatcgattcactgcttgctcggtgatctggtaaatttgctaggaacactaagctgtgcacggcaatggtaaattcactgttcatcttccataaaccaccttttttctttctctactgtaacgttaagtgacacagttcaaaaagtcaagagagcaaggagggaaagaagaagtgtagctttatttattcacggtcctctttttctatactttctacttcgttagctgagttgatttcaaggtataccgtcttttcttttaaactgcctttttcttctttttcaaagtcagtgcttttttgatacgtttttttgccgcttggaacttttaccgttatatgtttgttactttcttctataaaaatacccacaattttacgttcgtctccatcttgttcatacacgccatctttatctgcttttgcttttggagttaattcaatactaattgcttcttgtttagctgcgtcaatttcagcttctacttctttattaagcatatcttttagccgtgagccttccacttccatcctagagctttttggtactttaacgagttgatcatcaatattcagcgtcatttctttttcagcgtctttttttaacgtaccgatcaagtcaaaatcttcttctttcccctctttaatgtctgggtcgttggaatactgctgtagctttgttaattcttgacggtcttcaattggtttttcctctgctttatgattatcagattttgtcttgttagctggttcacctgaacaagctgccgcacttccaatcatacatagagtgactaaggacaggattccttttgttagctgtttttgcatatgtattctcctttttcttttttatttccacctttatacatatgtaaaacaaaaaagtgaaatataactacattactccaatcaacagctagaagcatctacatacaggaaacctacgttcaccctaccaatgaaaaaatccgaacgggttaaattctctatcaagaatcaaaaccgttcggattttcttttaactaaaacacttttgtcctagcctcttttttaaagctgctgttgcttcagtatatgatttgcttcttctaagtaagtcacgtaagcctgtacttgtttatcaccgtaattatctaattcaaacagcgcttcttgtataaacttaaaattatcaataatatgctgtgttttcatgcctctacttgtgagtaaattgtttaaccataaggcatagtccgtaaaaatttgcaggttgtctaacttatatgttgtctcaagatacttcatatgataatgattatcttcataacatctttctttgccgcgctctccgaatttttcgagcaaagaaggttctaactcgtagattttctccgttactctttcgacgatcttattaacgggaagtgaactcatcgtgccaccactttgtactgagaaacttttgggatgacagctgccagttcttgatcagggtactttttctctaaatcatgaatacgcttgaaatcttcgcttcgtacccagcttaaataattctctttcgtatcaaatgtaagctgaacggtgagctcccctgctcgcttatcgttttgaagaagtagaaagtctacaaatcctggagcctcgtcgactgattttgaacgatttttataaattccaatcacttcttcagctttttcatccggtacattaaatgttgaaaatacggtgtacatctttgttcctccctttatgatacaaaacctgggttcttttctctttattgtacatcatatgggagatgaaatggtgttacgtttagatttcacagcggttacagcaggtctttaaaacaaaaagccctttgaaacagcgtttcaaagggcttttttaccgttattagttttcgatttttgttaattgttctgtatgtgtttttacacgtgctggatcaattgtaatgcgggcaacgcctgaatccattgccgcttttgctacagactctgctacagctggcgctacgcgaggatcaaatggtccagggataacgtaatctgcgtttagctcttcttctgtaataagggctgcaattgcttcaacagcagcttttttcatttcttcgttgatatgagtagcgcgaacgtctaacgcaccgcggaagattccagggaatgcaagaacgttgtttacttggttagggaagtctgaacgacctgttccaataacagccgctcctgcttcttttgcagcgtccggcttgatttctggattaggatttgccatcgcaaagataattgcatctccattcattgatttaaccatctcttgagataatgcatctgctgcagatacgccgataaatacatctgcgcctttaattacatcgcttagcgtaccgctttctttgtttacatttgtataagaagccacttccgcttttactttgttcataccttgagggcgtccttcataaatagcacctcttgtatcacacataatcatgtcacgtacgccgtaagaataaagaagttttgtaatggcaatgccggcagctcctgctccgtttaagacgatttttaagtcttccattgatttgtttacaatttttaatgcatttacaagtcctgctactgttacgattgctgtaccgtgctgatcatcatggaacacaggaatatctacttcttttttcaggcgctcttcgatttcaaaacactgtggagctgcgatatcttctaagttaatgcctccgaatgtatgagccattaatttcacagtttcaacaattttatctgtatctgttgtatcaagggcaattgggaatgcgtctacgcctgcaaagcttttaaataaaattgcttttccttccataacgggaagtgaagccgcaggtccgatgtttccaagaccaagaacagcagtaccatttgtcacaacgccgaccatgtttcctttcattgtgtaatcatacaccgtttctggatgttcatgaatttctttacaaggttctgctactcccggagagtaagctaagcttaaatcttgagcgttttgaacttcaacttttgatttaacttctaacttaccttgtttttcttgatgcatatgtagtgcttgatcacgtagtgacataattgtattctctcctttttttctatacatttaaattttttaatgaatttatttaacacttgctttttatctccataattgtaagacaacctgaccgaataaattcacagacaagtgccattatgaaacaagaaacataaaaagtaaactatcttgcttaaacgactgctgcgctttgttaatataaagtctagagacggcgggactcttgtttgtctcacttcaagttgtctgatatacagacaacttagaaagcatacaagcgctcattatagcgctttcaaatacgtttcagcaaaatcgacggctttatgcattgaaaagaagtatgcacgtgctgaaccgattttttcagcttttattctttttgcttcaataaacgcttcacctatctcttcaaacagctcttctcgaaactctaattctttatacgtcttccatactcgctttcctgaatccataactggagaccctttttgaattacatttcgatatggaatccgatattctgctagatgaaaagaagtattatttccaaacccgacacctaataataaaacaaaggcatgttttttgtaaagcctttcaagaggagaattttcgcctaaactaaattcaagaggatgatctcttaagatgtcttcgctgtcctttccccaagcggcgaatgaatacattggatggctgcttcttcttacaccaggatatgttcgaaaagtttccacgatttgtcccatcccgcttgttggtgtatgagctggatcatatgcaggcatcgtttcccgaatagttttccaccactcttttggcacagccggattgccccattctgatggatccgaaagatcgaccgactgtgacggcatcacgatcgttccttcctctgtcactgtctccattaaagcttgaacaacggctactgaacctccgtttacccaccctaatgaagatagcgaagaatgaaccatgatagtcatcccttttgttatgcctaacctgcgtaaatcttcttttaatgtatctttcgttctaggatgatctgttgcttggacaatgtgcttcatcgtaagctccttacttatggtgctgctagaatttgtgctgaactctagcaatatatgtaaaacttatgtttccataatagtaagaataacaccaattgtcaaattatttaaagtaatagaaaaactcagttttattcatatcagttatcatacaactgacttgttggtaagcttcatttccttcaattatcttactataataaccgctactgaagcttttcaataaattaaaaagaagaatattcctataaataaaagaaatactaatgaagctatacatatttacctatcactattttcaggaggaatgtgtacaatgagcacatcaaaacttccgccgctcacgtcctcagagcttgctaacttatggatgacttatcaggaaaaaacgatgattttgaggtttttagaatattttctggaagataaacaggattacaaagaactttttgagctatattacagccgatctttaaaaagtgtagcgcaaattaaagaaatatttgagaacgaaggcgctgttatcccaattggttttacgaaagatgacgtgaatgtaggagtccctaagctatacgatcatatgttcgaagtcatgtatatacgcttaatgtctcaaattgaaacaggactgtttgctttgcattcgaccatgtcttaccgagaagatatccggaatttcttcgtagaggcaacagcagaagcacaggacatatacaatcaatccacacaagtattgttagaaacgggtgtcatcgcaaaacccccatacgtttctatgcctaaggaagtccattttgtccatgcgcaaaattatataggcggattgagctggtttagcgaaaaaagatcgttgaataccattgaagtgtcactcattcaacatgctgttgatacaaatcttgtaggaatgcagctgatgattggttttgctcaagtggccaacaataaagaggcacagcagcattttgtcaggggtatgaagctttcgaagaaaattgaaacagaactaggtgatattttacgccatagctacatagaacctccggctactcatgccggaaaagcgacgaattcaaccgttcctcctttttcagataagctgatgatgtacaatacgagtcttttgagtacgttcggtctggggagtaacgctttaggaggagcctttagtttaagaagtgatttgccattaaagatgctccagcttgcaaaagacatttacagtttggcaaaagaaggcggtaaaatcatgattcaaaacggatggcttgaagagcctcctcaaattgaagatcgcaatcagttaactaaaaaataggttctttcctgtaggaaagctagctgctctacgtgcagctagctctatttgtttttttagtatactttttttagggctagtacgtaacaactgtttgcgttatttagaagttgttcccatctttttcttagtcgtttagcccgtatttctacttaatttataacagaaaaataaaataaaaggtattttccctgagctgacgaaatctttctatataaaatagaaaggagaaaagtatgtttcctattcttcttacacctcgcactacacttcgtgaaataacagaagtcgatgcagatagtatttttgactgcttctctcagaaagacgttattagatattacgggcaagaaaaattcacaactattcaagaagctctggttctaattgatatttttgctgacaattacagaaatcaaaaaggcgtgcgctggggaattgaacggctcgatacgggggaattaatcgggacagttggatttaatcagtggaaccaaaagcataagcgcgcggaaattggctatgagctacaccctcagcactgggggcacggctatgcttcagaagctgcttcggctgttatggcttatggctttgatacccttcagctagtgcggattggagctgttgtgtttcttgaaaacaaagcatcacagcatgtgcttgaaaagctcgggtttcaaaaagaaggcgtgttaaaaaactatatgtatcaaaacggaaaagctcacgatacgtttgtttatagttccctgcctgctacataataaaaaaaggattcttttcttaaaaagaatcctttttcattttatttaaatgccgcatacccatcatcagccatgatgacgctgccgtttacagctcccgcttcttctaaggaaagcaaataaaccatatctgcaatttgttttggtgtagtgagctctctgctcatcgttttcgctttcattccttcaatcataccgttgtctttatagccttgaataatgggcgtatcaacaaatcctggcgcaacggcgacgacgcgaatactgtatttagcgagatctagcgcagctgatttcgtcatcatcacaacagctcctttcgttgcgtgataggcataggtaccgggtgaggctaagaagctaaaaatagatgccgtattgataatgacgcctttaatacctaactctctcattttcctgcccgctgccataatcccgtatgtaacgccgtgctgattcacattaataatacggtgatattcttctaagtcttgatctaaaatagatgtagggtgtccaatacctgcattgttaaacatcacatcaattcgcccaaagcgattcacggtttcttcaatcagtgcttccacttcttcaaactttgtgacgtccgtttgtataaataaagcgctccctccagcttcttcaattttttgaagggcctcttttcctttccctttatcataatcagcaatgaccaccgcgtctcctttttgcgcaaactttaaggcagtttctttgccaattccgcttgctccccctgtaataaccgctactcgtttttgctgcatgtttctccctccttgataaaagttcctttcttttacattatagcattcttttttataccatccgtttctattagtcacctcattgctatgaaattagccgagttaagcatagttgaacgccttttttaataaaaatcagcgtgtgtacaagcattctgtcattttttgcatttactatagtgtaaggaggtgatggctatgcatgaacacacaggaaatgtatctatcccacgtcctccggatgtggtaacaattctgtgggagcgaaatcctttggatagacaagctcctcgtactgtcgtagaagcaacagtaatcggcagcgcaaatccttgcggacgtttgttagctcaaggtcagcgctaccgcactgcagctcattgtttacttgacaacggctttgaacaaattactgctgaaagattaggggtatttggagtagctgtatttgttagagaatattaaaatagaaaaagggacttttctgtaagttagaaaagtccctttatacatattacgcgtggaaattcgtgccgtctgttacagcttcgattacaccagcgcggatgacaaagtcaccaaagtgctcgccttcttctctttcttttgcatagcgaggaagcaagacgcgcagctcgtttaaaatttcttcttcactgatattttcacggtacattttacttaagcggctgccatcaaatgctgctccaagatacatattgtatttacccggcgctttaccgataaaagcaatttcacctaaagcaggacgtgcacagccgttaggacagcccgtcatacgaatagtaatttctttatcgcgaaggccgttttcatctacaattgcttcaattttctcaagaagaactggtaaataacgctcagcttctgccatcgcaagcccgcaagttggaagcgatacacaagctaatgagctgcggcgaagagccgaataatgcttgccgtcagttaatccatattgttcgatgaggtcactaatttgttttttcttttcagttgatacgttcgcgataattaaattttgattggccgttaaacggaaatcaccgctatgaatttttgcaatttcacgaagacccgtcataagcttatagtcttcaaagtcagcaatacgtccaccttgaacaaaaagagtaaagtgccattttccttttacacctttttcccagccgtagcggtcgccgttatgatcaaagtgataagattttgcttcgtctaagctccagcccagacgattttcaagctcttcttttaccgtttctaatccaagacgatcaaccgtgtatttaaaacgcgcgtttttacgtacagagcggtttccataatcacgttgaatcgtaatgattttttcagctacttctagaatttgatcaggtcgacagaacccaatcacttttgcaagctgagggtaagttgctttatctccgtgcgtcatacccataccgccgccgattgctacgttaaacccaacaagtttctcgtcttctaaaatggcaataaagccaaggtcttgtgaatacacgtcaatatcattagacggtggaacagctacgccaattttgaactttcttggcaaatagagcggaccatacattggttccacttcttcttccacttccggtgtgctgatcactttctcttcatctagccaaagttcgtggtacgctcttgtacgaggcaataagtaatcacttaatttttttgaccattcgaatacttcagcgtgtacttctgactgatagggattcggattgcacattacgttacggtttacatctccgcaagctgcaattgtatctaataacgaagcatgaatttcttgaatcgttttcttcatgttccactttaaaattccgtgcatttggaatgcctgacgagttgtcagctttaacgttccatttccgtatttttgtgccaaatcatccatcactagccactgttctggtgttgaaacaccgcctggcgtacggactcgaagcatgaattggtaagctggctctagcttttgtttttggcgttcgttacgaagatctcggtcatcttgcaagtagcttccgtggaacttcatcaaacgattatcgtcttcagaaatacctgagctaatgcggtctagcattgtttctcctaatgtaccgcgcaaataattactttcatcttttatgcgctcaacgtcacttggaggaccttcgggcgcttttaaaattttgtttaccatgttgaaaatctcctttcaatcctcagtatacatcacgctgataacgtttttgtttcttcatttcagcaaggtaaccttccgcctgttcacggctcatcttgccttctgtttcgataatttcaactagcgtgttgtgcacgtcgcgtgccatatttgttttatctccgcacacataaaaagatgcgccttcttctaaccattggaataattctttactatgttcgagcatacggttttgtacgtatactttttcttctgtatcgcgtgaaaacgccacgtccatttttgtcagtacgccatcttttaaccacttttgccattctgtttggtaaaggaagtctgttacgaagtgctgatctccaaagaacatccatgactttccttttgcccctgtttcttcacgctcttgcataaatgagcggaacggagccacacctgtaccaggtcctaccataataattggcgtttcttgatcttgaggaagcttaaagtttttattgctttgaaggtatacaggaatcgtatcgcctggctgcaaacgttctgaacaaaggactgaacaaacacctttacgctcgcgtccatgcgcttcgtagcgtaccgctccgattgttagatgaacttcatcagggtttgctgataagctgcttgcaatcgagtaaagacgcgctggcattttacgtagaatggctacaaactcttgtgccgatacgttccatggaccgaagtcacgaactaagtcaattacatcacggccttgtgtgtatgcttttaattcctcgcgattttctacaagggcttttaacttatcgtttccagtaagctcagctgcttgctttaaaagcggctttgttaaaacggtaatttcaaaattagagattagcgcttctctaagaggacgcgtttctccttctttattaaccgttacactttcacttgcatcccacttgaattcgttaagaagaagatcaacaagctccgggtcattttcaggataaatacctaaactgtctcctggttcatacgtcaaacctgaaccttctagagatagttctaagtgtcgcgtttctttatttgatccgcggccgtttaagtttaagttctcaagcacttctgctttaaaagggtttgttcttgaatatggtgaagttcctgcaggagcttccgctggaacagctgccgaagcgctgtgtcctttcgcttcgcttaatccgtcaataacacctttaagccatttatttgcgggctcttcaaaatctaaatcacagtcaacgcgcggatacagtctttcaccgccaagttctgctaagcgcacatcaaattcttttcctgtttgacagaaaaattcgtatgagctgtctccaagcgataaaacagagaaacggaagttctcaagttttggcgctcgacggccgtgaagaaattcatggaaagatagcgcattatcaggcggctctccttctccatgtgtacttacgacaattaataaattttcaagtttctttaaattatttggtttgaaatcattcatagaagatacagttacattaaagccttttgcttcaagcgttttgcctgtattttcagcaagtccttgagcatttcctgtttgtgatccataaagaatcgttacgtcttttgaaactgtctgtttcgtttgagcaggcgctgctgtagaaacgtctggcgttccttcggcagacgtagattgagctgctgttaaataaccgctcaaccacattttttgtgcttctgttaatgtcggcagaaggcgattaagcaaatctgcttgttcttgattaaaagggctgtttactaccttaagttgcaacactgtccacctcacaaaaatatataatttaaatatgtatgcttttacgaatcatcttcaacaacatttaatacctgtgtctaattaatcaatgatgtttcctttcatacattattattcctatagattatatcaaatttaattatataaatcattagaaaattcttatcaaattcgtctacctgcattttatcggagaagaataaattagtaaaatacatataattgataactagtattaagatcattaataattgaagttatgtttactttttttataaacgcagttacttctatatttgttcattctacatccttcacatgaatatgaatattttgtaatttttagagaagttttgtagaaacggttttctttctcatcagaatgttacataataaatgtaacattaatccttttaaaaaacactatatggaaaagacagtatattctgaaatttaggacagtttataggtgagctagcaaccttttattccatctattcatacacgttgaagaatataaagggaagcttgcagtacatacaattcccttttgctcatctcaaatgaaaggactggcttttaaagcaggtaatcttttttaaggaggcttcttgaatgtttttacgagaattaacgaaaagtgggacgataactgtttcttactataaagatgggacgttgcaaacgtgcaaaggccgcgtgcacaacttaaatctccatcagcaaattctatccgtaaaagacgaaaatgaagccgttgtttcccttttgctttctgatattaaatccattcattagtatgtaaaattaaggaggaattaccatgtggaaagataataagcaagcgcttacagattttgtgtcggaagatcgatttgaactgaacttatatttaacgtatttgcttgatcaaatttcgtatgacacgtctaaacaatctccttttcttcgtaagcctaatgaaacaactagttaatatagaaaaaagcgcacaaatttgtgcgctttttttaatgtgatggctctacttcaacaatgccttcttctggtttttcttcagcttttttatttgaaagcttgatctgccttaagaacaatgtgcataccgctcctaaaataataaaagctaagcccatgaaaaagacgctgtgcaatgcgctcattagcgaggtcttcaaaattggcacaatgctgtctgaaagcgcagctggaatactctttagcgcctcagggctaaacagcatctgcagcacactttcaggattcgtatcaatcgcttttttaaacccgtctgcaaaagcacttgcttgagcaggcaatgtgtttaaatatggaacgagtttgtcagtaagaagcgtacctgattttgcattcattactgctcctaagatcgtaataccgaacgttcctccaattgaacggaaaaattgacttgatgatgtaaccacaccgagctcttcttttgaaaagctctcttgaagagcaagtgttaaaattggcattacaagacccattcctaaaccgattatggccatataagaagtggcaacaagtttgctagtatgaaggtctaatgttgttaacaagaagaaccctcctgccataatgagcatacccgtaacaatttgaggcttgattccaactttataaacaagctgccctccaataatacttgttacaatcattgaaatcatcatcggtgtcataatggtaccggattccgaggcgctgactccaacgattccttgcataaagaacggaacaaacgtaatggctccgaacatgccgatgctcataaaaaagccaatgatatttaaaagcgtaaacgttcggttcttaaataaatacatcggaagaatcggctctttcgctttcgtttccacaatgataaagcttatgaccccaacaacagcaagtgtaaatagactaataatttgccatgagttccagtcgtagtcttttcctccaaagctcagggcaagaagcaagctcactactccgataaccattgtcaacataccggctacatcaaatttaacaggtcccgtatgtttctttccttgaagtcccagtgcaataaaaacggtagcgagtatccctaccggcaagttgatgtaaaacacccatttccagttcagtgaatcaacaatccatccgccaatttgtggaccgatgacagaagcaagaccgtaaattcctccgaatactccttgaaattttgctcgtgcttttcctgtaaataaatcaccgattacaatcattgccatcggcatcataacgccgccgccaattccttgtaatgcacggaataaaataagctctgtcatgttatttgccattccacatagagcagaagcgaccataaaaataataagtcctgtaacataaattactctgcgtcctactaaatcagcgagtttccctgcaatcggaacaaccgttgtcgacgttaataaataggctgttgtcagccatgtcatcatgctcaatccaccaaggtctcctacaattcttggcatagctgttccgacaatggttccatcaagtgcagaaaagaacatcgcaataattaacccaattaataagagcgtgcgctttgaatttttttgattttccatcgtgtgtctctcctcttttttgttactgctgcttatctttataagaagcagctgacgttgcaagttttttcgtaatagaagccatcatagaaagctcttcttctgttaaatgcaaaaggtagcggtccataatggcttttcgaccattcagcacatcttcaagcttgcgatgcccaaactccgttaaggtaatatcaacgactcgtctgtcctctttattatgttctcttacaacaaaattgtgttgttcgagacgatccactaaaagagtcacggcgctcggtttgacatccattagctctgcaatttgagaaaccttactgctccctactttctttaaataagaaagaacaaataattgcgtaggagtcatctcatgctcatttagactctccattatttcaggctgcattttttcaaatagcacttgaagcgatgaacgaatctctccaagatactgattgctttttgtcacatctattcctccaggcttgcttatttatttcatgttataaatagttaatgctaattaaatataaatgcatataaactaaaagtcaattatttcttttttagtattgacccttacgctgcgttatattttatagtagattttagaagggagatgaaagaatgaacagaaaagtaaaagaggttgctgacttagtaggaatcagcgtccgcacgctgcatcactatgacgaaatcgggctattaaaacctgatgccgttagtgaatccggctaccggctttattcaccggctaatctcgatatgcttcagcaaatattattttttaaagaacttggcttccctttaaaacaaattcacgagattataacagaaccgacgtttaatcgcatagaagcgttgatactgcaaaaaaacatgctgattgaaaaacgcagtcggctcgatcaaatgattgtaaccattaataaaacgattcaatatgaagaaggagcgattgaaatgaacgaaaaagagcggtttaacggactggatttttcgcataacccatacgaagaagaagcacgaaagcgctggggaaaccagcgggtagatgaagggaatgaaaaagtacaaagcttctcacaagaagaacagcagcacatgtcaaacgaatgggaaagtatctacactcacttagcttcgcttcgtgatctgtcaccatcctctacagaagctcaaaaagctattgcgacatggtatcaatttttaaataaaaactttggaacgtattcattagaagcctttaaaggtcttggagaaatgtatgtgcaagatgagcgatttacaactaacatcaatcgctatggaaaaggattagcgaaattcatgagcgaggcgatgagtgcatttgctgatgctaacaaacaataaacaaaagagatttaagtataactaaatcattctaatctaaagataaatagattggatacatgggctgaactgcttgttacagcgcaagcataaaaaaatccgaacgacgttgattctccatcaagaatctcgattcatcgttcggatcttcctttaacgaaactacttttgttccagcctctttttataaatgaagccccataagcattgtattatagtacaagccatttatataggtgtctttttcttttaatccttctatttgaaaccctagctgcttgtataaagaaatagctctttgattatcttctcgcgtcacaagttcgattttttttgtttgtttattcatacgtgcccattcaatcagctcaatcattagctgtcttcctaaccctagcccgctataagatttgtctaccacgataccaagggtacccacatgcttattacgcgggttttgaggcgaggtgatggatgcaatactaatgatttcttcttctttttcagccacgactataagagaattttgctcttgttttacagaagctaaaaacacttcatactctgaaacaggtctaagaaactccccttctccaaatgaaagaaaatcactttctcctcccactcgattgtaaaaagcaatcattttctctgcatcttttgattctgcttctcgaatggtgacgcctataccattctttaatgtacgtaaactcatatacctatcttccttttagttattcttgtttgcctatatgggttttagcgttgtttttctctccactgacctaaccacatgcgatttcctaaagccgtaaaatcattttcatcggcgtagcgttcaatgacggaaagcgcgttgtcctcaagcattggtgaatagctcataatttctaaaatatgatgtgcagcccataggtcaatccgataagtaggattcgtcagcagtgttgaaaattcaaacagcatgcctggatagtataaatgaatgagctgcgcaatttttttcatatcttctgcagctcggtttcctttttttacagatttcttatttcgataatcaatttcataatgaatttttgcgcttttttgataaagatcaactagcgtttcgtacgtacgatgtttctgcatttctcatcttccttttcttctagatttcctcgtttgaagatgctatagttcatttttaggtttcatatattcaaataaatgcagcaaaaatataatacttccgccaatacacatcacaaaacttaacgtagcaggatactgaataaagaaaccgacaacaccaaaaatcagcatagcaagcgctcctatcatcataaacagatgatatgccggtgtattttcttcattattcatacataactccttttcactattttttaagttattaaaaagatatgatacttcttttggactatgatcttttattttgctgccgctttatttctttagcttagcacgaagtaacgtgagaaggcctcctccaaacatgacgccacccacaatttgatacaggtgtatgtagctttttaccgtttcaagatacagatctgtgtctgcattccctttactttctagccatctttggcccattgcctgacccgttgcaacgctttttaacaaaacgaccaggcctccgagcatgacaacggctgcgatcataagctgtaccttttctttgtcatctagcatttttttgaattcgtctgccatctatctctctcccatccttaccttgttatgtatctacttgtttgtaatcatgctgttttttctctattataacgcttaacttggtcattataacacggttttgcactgcctttagtcttacttttcgtaaatgaagccatcttgggtgatactatttttgaaacacaggcgtctttaacatccctttattatttttgaagggttactaattgaggttgatacatgcttatatttttagggatttttttactttgtgtagctgtttgtttagtagaaataccttatttaaaaaaagtgaaaagtaaaagagaaaagcgaattttttggagtttgttcacagtaagtatgttgattgttagtttaaaatacggcggtgtggaaatccccaaccccggggacggcattgcttttttattaaagccttttagtgattttttgttcagtctgttgaagtaaaaggaagtgaacaacgtgcatagtcagatgaaattatccgcagcacagtttcgaatactcgtgattttttatagtttaggcgacactattttagttgtacctggaagcttaacggctgattctaaacaagaggcatggattccagctattttaggtgtaggtgtaggcgttttacttgtatggatgtatatcaaactctctagcctttacccgaataaaaccctgatagaactcaacgaagccattttaggcaagtggctaggaaagtttgtctctcttttatttgtcgcttctactcttcttttttgcagtcaagttttgttttacgtgggctcgtttctaacaactcgcattattattcaaacgcctatgcttgctgttcatattttgtttatgggaattgtgactgtcggcgttcggcttggcattgaaacgattgcccgctgtgctgaaattctcttcccttggtttgttattccgtttttaatcttagttttttcgatctttcctcaaattcattatgagaatttacagccgttgttagaggtaggcgttaaacctattatcagatctattctgttctttacaagtattacttctctcacttttattgtattgctgaccgttttccctgctcacgtagcggaacctgatcagcgaaatcgcgctttttttacaggaagcttaatcggtggaggcattatgattattattttattgcttggcattcttgtacttggaaatacgtatacacgtatcgctttatatccaagctatgaacttgcaaagcgtatcgaagtggccgattttctgaaaaacattgaagtaatcatggccattatgtggtttttatctctttatttcaaaacgtctctctactattatgcgaccgtttccggactcgctcaaattcttgaattaaaaactaccgaattttaactcttccgctgggcgtgattgccgttacattttcacttatcgtgtatccaagcattccatatgaacaaacgtgggacagagatacgtggattccgtacagtctgttatttggactattttaccctcttggattattaattgttgggaaaattcgcggaaagcattccgcgtctttatccaaataaaaaagccgcttaagcggcttttaaaagaatacagttatactcactaatccattccacagcatatgtaaaatcatagatgggaaaatagattttgttcgataataaataatggcaaaaacaagtcccattacagtagccgtaattgggaaaccaatatgtaaaagaccgaatacaagagcggaaatgaaaatgcctacaagcacgtgatgacgtttagttaaaaagccacataaaacaccccggtaaagcagctcttctttaataggcgtaatgactgctacacttataaaaaatatccagctcgaaagcagcgtttgattaaaactgccttgatttaaatccttttgctgctgatctgcgctttctacgtttaaaaatgaaagcatcaggtactgcaccgcggctacaattaaaaagcctactacaatatatacatacgtttttctttcttttaatactgagaagttccacataggctttaaaaatctgcgcacaggcctgtacagcacggaaacgcctagaaaaaacgccgcgtctaccagcagagcatatggtccttctaataaaattcccgtcatatttgaacccgtaacttcatcgtaaatagctactccaattccagctataatctgcagaccaaagcccaacacgataaatagaagcagcgtgaagtaagtaaactcttttttctttttaggctttaaaaccggttctaaatttgttgataacgtactcaaaatagtaacctccaaaaatgattctttctctctagtgctctcaaaattctaccataacttccgcttaacgatgttattttttaggaaaaaagttatattttttcacattttacacccaaagataaggtttgaaaagataaatgagctagccaaattagttgtcaacttccttatatttgattacgcttgaagaaatcttaccgaaagtgaagtgaaaaaatggcaaacattttaatgatcaattttcccgctgaaggtcacgtaaacccaacgcttggaatggtaaaagctttttcagaccgaggtgataccgttcattacattacggccgagcgttttaaagagcgtcttgaaaacgccggggctatcgtacacactcaccgggacttattaagcggtgtatccatcaagcctgaaactcctcaaggaatcaacgcttttttaaatatccacatccaaacgtctttagatacgctaaagcttgttcatacgttatcaaaaaaatttgactttgactttgtgttttacgacaagtttggagcaggcgaattagtgcgtgattatttgcggattcccgggattgtatcatccgcttcttttttaatgccaaaagaacgcttagcaatgatgcctctgcatccggattcaggcattccatttaaacctgacgaaaaagctcagtacgggctcagcttgctgaaaaatcagtttggggtagaacctaaaaatctgcttcaatttatgaacaatgaaggcgaattaacggtcgtatatacaagccgcttttttcagccgcttcatgaacattttgatgactcgtgtttatttattgggccaagctttccaaagcgtcacggctctcatgattttccgctagaaaagctaaaagacgaaaaagttctttatatttcaatgggaacggtgcttcatgatgtagaaggctttttcaacctttgcatcgacgcatttagcgactttgaaggcaaagttgtgattgcagcaggagaccgagctgattttaaaaagataaaaaaagcaccagagcattttcttatttcgccctatgttccccagcttgacgtgttaaaagaagctgatgtttttatcacgcacggaggtatgaacagcgtaaatgaaagtattcattttaacgtaccgttagtcgttttacctcatgggaaagatcagcctctcgtcgctcaaaggctcgtggaactaaacgccgggtatcgcttagcaaaagaaacggtaaatgcttctcttttaaggaatgcagttgacgaagtcatacatgacgaccgctacaagaaagggataaaagaaatcaacgtaagtttcgaacaggcagctggccccgccgctgcagccgaaaaaatagtaaatcacgtagtgaagcaatattcataaagaaaaggtgcacatttgtgcaccttttttcattaaaccagctatgtacaaactgtatatacgccaatgattagcaaaatgacggctaaaaaacttatgaatacaaatccatatgactgaaataatcgaaaatatgatttaaatctgtaatctttatgctatgagtgctgtaagcaacgattatttcagccagcataagaacgaataaaatggccaatagcaccttaacaagcggaaattgtcggaactgaggagaaaaaagcagcttactgactgtatacaaaaacagcaggataaagtagatcatcatggcatttgtcgcctgaaggggcacattccagacaaatatgtacacgctgaatgtcaaaattaaaataaacgacatttctttcccgctaaaaaaatcactcattgcgtaacaccttttcttgttcatgaatgaataagaaattataaactcacgaaacattaacattatttttacaacagtatacacgattttcctattaatttctatataccggtgtatatatggagcggcttttagcggattggcgtcatgtttttgagtgcaatgggttatagtaacagggaaagctcataaaggaggtttagataatatggaaaacacaaatgaatttgttcaaaagctgaacgataatcaagaaaagcagcgtaaaaataagcaggggcaagctactgggcatcctgagaaaaaacttcctaacaaacagcattaatgttgtaaaagttggctgtaaagacagccggctttttttttgaactttcttcggaagtcgaaatgtttggagataaaacaaaccccctgttacaataaactgaacccgctgcaaaacgttcgcagctatactttcctcttaaggagctgaatataaaatgagtaaatttgaaaaactattccaaccaacaaacattgaagcatttgatttacacactcgtacagcaatggcaccgatgacaagatgctttgctgatccagagacaggcgtagtcggtcaagacgttgtagactattaccgccgccgcgcaaaggatggtattggcttaattattagtgaaggaattgttatcagcgaacgcgcaaaaggaaatcctggcgttccgggtatctatacccaagaacaaattgattcatggaagcctgtaacagaagctgttcatgaagaaggcggcacgattatcgctcaaatttggcacgttggccgcttgagtcattccgggttaatcaatgggcataagcctcaggccccttccgctattgcagcacaaggccaagtgcctcgtttccgcaagccctatgaagagcctgaagaaatgtcgaaagaagatattaaagaagttgtaggacagtatgcccaagccgctaaaaatgccattgaagcaggatttgacggcgtcgaaattcacggtgctcacggctatttgatcgatcagtttaattcagactggtctaataaacgcactgatgaatacggaggcggccttgcacagcgattaacgtttatgaaagaagtgatttccgctgttatcgacgccattggaaaagagcgcgttgtgattcgcttctctcctcataagcttgataaaccagactaccgctgggatgatactgaaaaagctattcaaacgtatacagaagcatttaaagaaacaggaattgagatcatccatccgtctatgctggatttttatgaagatgttcaaaacggtcaaaatctttatgaaattacgcgtaagtactgggatggaccgattatcggtgtaggtgacttaacgcctgaatcagctgaaaaagcgcttcaagccggctggatcgacgtagctgctattggccgtccgctgatttcaaatcctgattatttccagcgcattaaaaacggtgagtctcttgtcgaatacgatgctaaaaaacatttaccagagcttatctaaaaaaagcgctccttccggagcgctttttttactggtttacgtatgcctgaacctcttgtttccaaatagcatagccttggccttttaaatgaagaccatcaaccgtgaaattactttttaactgattatgtgtagatacttttgaatacagatcaatgtaagaatcgttgtgtttcttagctagacgctctaaatagttatttaatgcgataacatctttattgtccactgcgtcgccgcattttttattgttcacgggcagtacactttgaacgtagacttttgtattcggtgattctttatgaatacgttcaagaatttcagtataattggctttggttttttttacagatttttgctcgtttaaatcgttaatgccaatcattaagaaaatcttttttggcttagcatctgtaatactttttagacgatgcaataccccttctgttgtatcatcagctacgcctcgattgacaatctgcttattatgaaaaagttcgctccattcagagcgctgggtaatgctatcaccgagaaatacgattgactctttaggaatacttaattgcttaaacaaagtggtccgttcaatgtaataaggattatccctatagctttgcttagacgaatccttagatgacagcggatttttcattgcgctgctgcttgtggcataaaaagcaaaaacacctaggaaaaggacatttaaaataatggaactgataaatacaactttctttgttgaactcacgaaaacgacactcctgtactttgtatgttttttagataactctacgatgatatagtaaagcttcctgttaacactctttccctccatacaagacatttaatcattttttgtaaataatgattttatataaaaaagaagcggcgctcgaaagcgccgcttctttttctataatataaggggttaaaacgtacttttattataacatatagtctatggtcatattttcctctattagaaaatagttcttatgtcgtttctttttccagctgcttttctcttttcacttgctttgcgaagaagagttcgtataccactggaataataattaaggtaagaagggtagatgacgcaagccctccgattaccgtgatagctaagccttttgaaatcagcgttccgcttgatgtagtaagcgccagcggaattaatgcagcaatggtagcaaatgccgtcattaaaattggacgcaagcgcgttttcccagcttcaataagggattcgcggatcgtcatgcctttttgttcacgattttgggtaattcgatctacaagcacaatcgcgtttgttgtaacaattccaatcagcattaagaacccaatcattacgctgacagacagcggttcttttgcaaggactagaccaactaacgaaccgattggcacaaaaatgagtgacgataaaatgataaatggaatacgcgcttttccaaacgtaacgagcatcgttaaatacacaagaccgattgctgttaaaatagctagacctagagattggaagacttccactgtctcatcgcttccgcctccaccgtccaagctcacatcttttggcaagtctaactttttcacttcatctacaacatctttggtcacagcttgaacatcatcgcctttaatgtctgcttccactcgcgcaaatactctgctgtcaagcttttgaatagaagtgaacgtatcaattgtacgaacgtcagcaatatcttttactaacacaggtcctcgttctgtaaatacttgaagatctttaatttcttttactgaactaaggtctttatcgtacgaaagctgaaccgctcgttttgcattatctaattttaagtctccgacggataccggtttggtttggtcggagattgtaccaagcagctgaaatccagatactccgtactctgcggctttatcaggatctacttctactacaagctgcttttgcttatctgagaagttatttgttacatatttaagacgtttgtctttgtttaagtggttttccacttgcttagctgccttttgcaagtcatctaaattagaagaatataaatcaacggttacgttattatttgtaggaggccctcctgttgatgcttcttgtacattaactgttgctttcggtgattcttctttcgtgatgctttccattttcttttgaactttatcaataaacgtatcaacgttcacgccttcttttacgttcaagaaatagccaacttggttcgagcgttttacacctgttgaaaagtcgcgtgatccaacttccgtagtcacatctgaaatttcattttgatccgcaaacatcttttcaatttttaaagatacatcgtttgttttttcaagtgatgtagatgccggtaattgaacgttggcctgaagcattttttgttcttcatttggaataaacgtaaagccaagtgaaggaacaagcgcaaatgagccaaacagtaaaataaaggataaaattaaaattttgattttatgattaagcgaccatgcaatcgcttttgcatatccgcgctgcatctttccttctttttcttcaggcggtacttttttaaatgcaaactttgctaaaatcggcacgattgtaatcgctacaagaagagaagctaacagtgaaaaaacaactgttaaggcaaacggcaagaagaactctcctgtaattcctcctacaaaaccgattggcaagaatacgacaaccgttgtaatcgtagacgaggtgatagcttttaaaatctcttttgtggacgattcgacaagctcgttgctcatgccttcttctgaacggcgaacgcgtctaaaaatattttcaatcacaacaatactgtcatccactacgcgcccaacggctacagccattccgcctagtgtcataatgttaagtgaaatatcaagctggtttaagaaaatagctgatactaacagcgataatggaatcgatataatcgcaatgatcgtagcgcggaagttacgcaagaaaatcagcacggcaagtgacgcaaataatgctccgagcaatccttcgcgtactaatgtttcaacagacttttcaatgccgtcagctgagtcaaagccgattgcgtagtctaactgatcgtcatattttttcaaaattttcatcgtttcgctcgccacttcaaccgtattagcatcttgtttttttgtgatggccatcgacagtgcatctttgccgtcatagcgtgtatattcgccttggtctgttacggcttcgactttggcaatatcgccaagcttcacaggctttgcttcaggattcatcgtagatttcagctggattttctttaatgcatcgatcgtcgcaactttttcttctactcgcactggaatttgaagctcttttccgtttaatgttcctgctgggaatgaaacagctttttgattaatttgttctttcatctcatcaagcgttaagccagcttgagctgctttttctttatcgaccgtaatttgtaaaaggtcctctttcacgccgccaactgagacggagttaataccttgaattttattcaattcaggaattacttcatcatttaatactttttcaagatttgcatcatctttcgcaaacagtgaaatgttgaagatcgggaatgaaccaaatgaaaaacggtttacgtctacatttgatgactctggtaaatctaattcttttatcgacgagttaatttgctgttcaactttatctaaatccgtattaaacgggaattctaaattaataataccgacgttttcgtacgatacgctttgtacgcttttaacgccttcaattcctttcacttggtcttcgattttcgacgtgacgctttcatttacgtcatcaggagaagccccgggatacgttgcttcaatggacagctgcggaaattcgatattcggcagtaaatcaatttttagttttgaaaatgaatatagccccgctaaaataagtaaaaatgaaacgataaacacagctactgcatttttcaaactaaatctcgtcaaaaaattcatctttttcctccgttacgtaactaagttatttgagaagccttcatcctttaatagctgcagacccgttttatttttttaacaattttagagtacccgcgggtcagtttttcgcgaaaaaactcacctcctttcatgtgctgatgaactctctataaaaactgaaatttgatggtcgcatgctccccctggcagcgagataaaggaaaagccgtcttgaccatataaatcccaaccttcgaaaaaagagctgtcgtgaaacatatctagcgcatacccattagaaaatgtaattcgaagtataccgatatcttcataccactgtatagagataatgtgctggccaagcagcagtgcttcgacttgctgacgctgctcggcagaatgtagcgatttccagtccgcttgaccaagcaagatgctgcgtttgttttttagtctccatggacattctgccacaagtccacctttactaaatccaagagaaaacggcagggtattgtctgtgttaaccttggtaacggtttgttcttgaaaatatgaaaaattaattactgtgctgctggtattcatcatatccctccattatcaaccagtaccgacgagtcatttttagctctcaaagtagcagccttcaatgtataagttcacaatgaactccgcatagttcatgatatcttcttctgttatatcatcattggaaacgatatccatcctatacccatttaacatgctgcaaaacgcttttgagtgtaaaaaagcattttttattttctgctcttcaatcaatttagcaacaagcccgtgataatcctcaaaaaattgatgaagacgccccatcatttctggcatttggtgaggggcttgccaaaaagagtcgggatattttttagtttcgtaaaaaaagagcagatgatgcttcgcaattgaatacagcttttcatgaaaagtttggcattcatccgttcttcgctttgcatgatacaaaaactcatcaaacgaacgattgttcacagcgatataaagcgactctttagacgaaaagtacaagtaaagcgttcctttagatacacccgctagtttagcaatatcaatcatttttgcttcatagtagcctttggatccgaacacttcaaaagcagcatctaaaattttctctctctgctgttttcggtttgtcatggtaaaaaatcctctcatacgttttcgatactatacatataaaataattaaaataacttgtcaacacgtagtgtgctcttttatcccttgcatcacaagagtatgtcagttttttaaacaaagcacttctatagagcaaattaaagcgttttcgacttttttgtgacagatacaaatgatgcttgtatctgaagagctcgctatggtacatttttgtcattgatacagaaatttattccgtcgttacgggaggagaaaacatggttcttacatcaccaatcggtcgcctgcgtttagtaggaattttagaaggaatttcatttttactgctgcttggcattgctatgccgctaaaatatgcagcaggcataccagaagctgtatcagttgtaggcgcagcacacggtgcactttttgtgctgtacgctcttgcagtagttcatgtaaaattcgcgcataaatggtcaatcggccgctctttatttgcatttcttatgtcggttattccatttggtccttttattttagagagacagctgaaaaaagaacagtaaaagaaaagaacgtcatggacatcatgtttccatgacgttctttttccttactgtccaccactgttttcgctaaaatggtcaatcgttttccaccacttcagtgagtgaggttttaatagcattccaatttcttctgggctaatttgctgatctataatcatttcatgcattgcttgaaagagtcccgttgtaacagcttctttcacatcagcttcaccttctatatacagctgttcaatcgcttcaaatacgtccggttcacgctggagctggccgttatattcaagagagattaaatgacccgcaacacggcttaattcatgctgcagctcttctttatcgttgaggtccacttcttcgcttggctcaaaagatgggcaagcttcttttagtaatggaataacattttgttttgtaatcatatctaaattccctgcctttgcatgtgtgacgaattctctatttctttacccttttctctttttctataaacttgttttacaaaacttttccgttttctacaactacttttccttttttcactacgcagtcaatatgatttaagccatactgatattgaagggttcgataactagggacattaaaaatcgctaagtcagcctgttttccggcttcaatactcccaatcttatctccttgattaatagcatgagctgcgttaatagttgtggctacaagcacttcttcaggactcatgttcatattcatacatgccaggttcatcacaaattgctgtgaagtcgttggagacgaaccaggattgcagtctgtagaaagagtaaccggcactcctaaatcgatcatttttctagcatctggccatttcattccaacaaataaggaattccccggtaaaagtgtcgctacgatccgcttttcagccagtttctttaatccttcatcagaagcatacaaaagataatctgctgatatcgctcctacctctgctgcgagctccgctcctcggcagtattcaaaggggtcggcatgtattttaggaagcatgccatggcttttcccggcttctagtatttcttgacattgtttgaatgaaaaagcatttggaagacatacagcatcattaaatgctgcaagcttataagaagaaatttgaggaatcatttcgtgaataagtaaactgacgtatttctgcgtatcttttttatatataagaggtacgacgtgtgcgcctaaaaaggtacttattacatcaactgcgtgcgtatcgttcagcattttagcgatttgcagctgctttagttctgtttctagttctaagccatacccgcttttcacttctatagttgtgactccgtgagctagaaaagacgtaagacgctcatagctctgctgataaatccggtacgcatactcttcctgtgtttgaacgacagtggagtgaatacctccaccttcttctaataaatccaagtaagaagttggcctttcaaaccgcctataaaattcttcttcacgcgagccagcgtacacagcgtgtgtatggggatcaatcagacccggagtcacaattttatgagaagcatcaataatcgttgcgtcatttctttccctttcatatttttgttctagctcttttgttgtacctacggtcacaatttgatctccttctatccagactgagccattttcaatcaccgttaagtttctcatttctcttccagctaaaggacctttattttctttgaccgttacaacttgcgaagcatttttaatccatagcgctttttttgacatcgttgaatttcccccttttctagcgtgtaccacgttttggggcctcatgtttaccgtaaactcatttagattcacctacacatttcgcacctctgccttctttcttgtaggtagaaatttgaaaaagcatgtccatggtctgaaaagcgtgtttttaagtctttaaagctagataacttataattttttcaattatatatgcttttagacccttcttttctccgttttattacttattaattctcgttttatccaaatatatccctatatactaaatcttttatcacatgtattttataaatatcacggcgatttcccctcaacaggataaataatagatttctaggaatagaacgtttataatattctttgaagttttacttttagaaagattcactaatggaggaagaaatatgattgtcaactataaaaaccaagcaaccggtcatcgcatgaataacggctggaatcttttctatgcgtcaaacttaacgatgtggcgcaaagatgaaaagtatttgcttttagatgaaaaccaagatgtagtgatgatctttggctttaaaaaagacgaaatcattctagataaattgcaaacgtggggctatacatttggtgtccatccagagaaaaaacaaatttcctgcttgcagcgtcaagaagaaattggtgaataaaaagagggctgaatttcttcagtcctctttcttattaatgggtttgttgaaacatagcgctcagctgttttttttcagatggtttgacaacataataccatgtaccatctaccatttgtccttctccttttacggttaccgtttcgaaatcaggccggcccttcttaataacgttatacatcgtaaatgcatcgctgacatcaatattcgttcgaatatgcttctttacaagcgtgaggagacttggaatgtttttcaccgttgacatgttcattcctttatctaatagagcttccactacttggcgctggcgattatttctacctaaatctccttttggatcttcgtgtctcatccgcacataggcaagagctttttcgccgttcaacgcattttctccttcaggaaagataaatgaatcaaacacaaaaggaaacgggttcttaacgtatactccgccaagttcatctactacatctttaaagccttccatatttactttcacataataatcgacatcgatatctaagaagttctcaaccgtgcgcacggttaaaggaatgcctccgtatcgataagcatgattaattttctcatccggtccttttccatcaatgtgcacgcgcgtatctctagggatcggcataacttttgctttattgtggctcgtatctaagttgaccaccattaatacatctgagcggcctgtatctcctggcctttcatctacgcccataaccagtacattaaacgagtgaggctgctctttagcagatgtttcctgttgataggcaattccaaatccagcggttcctaaaagtaaaatacatgccgctaagatccctattttgtattttttcattcatacggtctcctttacacgtcacttactctctatatgccttaatgaatgaaaatttatacctttttagagaaatttaagcatacgtcaaaaaagcctgcttgttgagaagctggcttttcactagtagattttagcttgatttttgatgcacatcacgctgtgcccattcactttctaacatactcatttcaattaagctccagtactgtccatctacaagccggacatctcgaagaaggccttcgcgtgtaaagccaattcgttcataggactgaatcgcccgctcgttaaaatcaaagacgccgagcgaaattcggtgaagacccagttcttcaaaaccgaaagctaacactttttcaaacatgtgcgagcaaagcccttttcctctatactcttcaccaagcagcactcggccaattcttcctgttttatgataataatcaatatgagcaagagaaatatgcccaataagctgttcattttcatctatgacggaaaaagcataggtagaagcaccatcttcatttgcatatcgaatgtagtgttttaactgtctaggagtaagcggaaaagaaaagctagagccgctccattgcaccataaatgactcggagggaatccaatccattagctgtttaaagtcttttttggagaacggtcgtagagctatcacataattctcccccttattatttctgacttttctaaatatattacatttatcataataaactgtcaactgtctatgtaaaaaaaagccatcatttcgatgacttatagctgtaatgcttttctgagaagagttaaatcatgagtgaattcaaaaaaataggttctattttcattgtcaaataccatcatgattggcttttggttcggctcaagaacaaaaataacttcacttgccagcgtgttgaccgcactattttcaatttttaaggctggatcaagaggtactttaacaagatagccttttttaggaagcggacttgcctttttatataaaccagtaatggaagcaatacttttttcagcttctttttgaacatttggaggtttgagcgttgaacgaacgactctgcccgtttcaatttgaaatatctctacttttggctgttcagcatttactgcctgcggaaaaataaaagcagcgaatacgacgcatacagccacccattttcgtatcatttttagcacctctttccattcattgtggatgagatggagataagaatggtcgtctcttcttatactatgacctatttttatgtatttatttcactaaatgaatgcctatacttccatgtttttgtcatgttctcagaacttcctctatacactactaataaggacacgctgtatgaggtgataagatgtcgtggtttgaagcatttattttgggaatcattcaagggcttacagagtttttaccgataagcagcacggggcatttgtatttagggcgccacttatttggcttagacgatgcaggattgtatctagatacgatgctgcatatgggcactctgcttgctgtatttgtcttttataagcgtgagctatggcatattattcgttatccctttagcaagcttacagggcttttagtaatgggaacgatccctgcagttgcgattggtcttttgttcaaagactattttgacagtatttctaaatctggcttaacgatcggctgggaatttcttgcgacaggactgctgttatggtttggtgattccgtaaaaaatggctataaaaaaatggatcatatttcatacggagatgccttttttatcggctcgtttcaagcagctgcgatattccctgctgtatctcgatctggtttaaccatggtagctgcgttaatgcgaaaattagaccgtgaaacagccgcttacttttcatttttattgtcgactcccgccatttgcggagcggtgttacttcagttaaaagatgtagtcacaggtgaagtcgagcagctttccgttttctttttattcgttgccaccttttcatctgctttatttggttatgtagcggtaaaatggatgatcaattatttaaagcatcattcattaaaaacgtttgcaatttacgtttggatattaggtgcagtcgtgctgatttgtcagtttacgggggtgttttaagatgaagatgaaagtccggacgctttttctagtattgttttttgccggcattttagtcgtgacaagctatgttgataacaattcccagcagtcgtttaacagtctatctcacctttcacttgatggaggagctgttgaaacctctgcagatgaagacaaggcggaacaattaaacatgtcggtcaaagaagttcatgttaaaacagaaaaaagaggcggataccgaattgaagtgtacgaacaagtaaatgtttatagagatgataaaggaaaagtagtaaaaaaagttcccacgggagaatatcaaacgttgaaatataaactgaatgaaaaaaaataaaccacttaccgaagtaagtggttttatttttaatggttaaagtgagctgcaagaatccacagtgtacccacaacgatacaaagtgcaataaagaaactgtaaagaatatttgcaacctgtactttaccattttcactttcagtcatgtgcatgaacattactagctgcattgctgcttgtaataacgctaggatcatgataagagtcatcgtaatgcttcttgatagatcagctagcactactaaaccaagcgctgcgaatgttaaggctagtgaaaggataagcccaaatacatgactaagcggaaaacctgctttttggccttgtttattttccatgtcttatcccaccaatccgttcaagtatacaagcgtgaagatgaagatccatacaacatcaaggaaatgccagtataaaccgataataaatactttacgagcagtaactggtgttaatcctcgtcttactaattgaataataatactgattgcccagaatacaccgactgttacgtgaagaccgtgcgttccaagtagtgtaaagaaccctgataagaaggcacttgtttgcattgttgcaccttcgtgaactgcgtacatgtaaaactcacgaatttcgtagaaaaggaatcctccaccaagaacaagcgtaatcacgaaccaaactaaaagtccttttaaatcattattacgcattttaaagatggcaattcccatcgtgaaactactgaatagtagtaacagcgtttcgatcataaaatctttaacaacgaacagttcttctgcagtagggccacccgctgtacgcgtatggtacgttaagtacgttacgaacagcgtagagaacaacgcgatctcggcacctaagaaaatccagaatccaaggatattcaggcgactttgttcttcttggtattctaacggcaatgatttatctaaatgtcctgccattatttgtcaccccctgtaattccttcaaccttcttgatttcatctacttttacatagaagcccggatcataatcaaatgaacgagcaagcatacaagcaaaaatacctgctaatccaacaattgccattggaatccattcaaacactaagccaaatccaccgataaaccagaaaatacctgagataaacggcacaccagagttgcttggtaagtgaattggttttaagtcttctgctttaatttctgtttcattacgttttttcatgtgccagaatgcatccatttctttcacatgaggaattactgcaaagttgtaagcttgaactggtgatttagtccaccactcaagtgtacgaccatcccaaggatcgtttgcagtgtcgcgtttgtttttccatgcactgtataataagttaactactaatacgaagaagccaagacccattaagaatgcaccaattgttgaaactaagtttaatccgttccagccaaggttgtctgcataagtttgcatacgacgagtcataccgtctaaacctaggaagaattgtgggaagaaacatacgttaaatccaacaacaaaaatccagaatgaaatttttcctaatttttcgttcaacgtgtgaccgaaaatctttggataccagaagtataaacctgcgaaacagccaaacactgtaccagagattaatacatagtggaagtgagcgattaggaagtaactgttatgatattgataatcggctgatgccatcgcaagcataacccctgttaccccaccgattacgaagtttggaataaacgctaatgaccaaagcatcgcagtcgtaaatttgatacggcctttatacattgtaaagagccagttaaagattttaactccagttggtacggcgattaacatcgttgtaattgagaagaacgagttaactgacggtgagttacccattgtaaagaagtgatgcacccatacaaggtaacttaagaatgcgataccgaccattgatacaaccattgctttataaccgaataagttcttacgagaatgtgtactgataacttctgagaagacaccgaataccggtaaaataacgatatatacttcagggtgaccccaaatccagaataagttagcccacatcattggaagaccgccgttagccattgtaaagaaggctgttccgaatacacggtcaagtgtcataagtgcaagcgctactgttaatacagggaacgcgaaaataataataattgatgtgatgaagattgaccaagtaaacattggcattttcatcattgtcatgccaggggcacgcatttttaagattgttacaaagaagttgataccagtcattaatgtaccagcaccagcaatctgtagtgaaacggcatagaagttatttccgataccttcactgaattctttacctgcaagcgggaagtaacttgtccaacctgcatcaggagctcctccgattacgaaagaaaggttaaatagcattgctcccataaagaatgtccagaaactaattgcgtttaggaacggatatgctacgtcacgcgcaccaatttgtaatggaacgattacgttcattagtccgataataaatggcattgccatgaataagatcatgataacaccgtgagccgtgaagactccgttgtagtgatgttcatctaaaatattcatacccgggaatgcaagctgcatacgcatcatgattccatcgattccgccgcggaaaagcattaatacagctgaaaggatgtacatgacaccgagtcttttatggtcaactgttgttaaccattctgtccataaccatttccatttcttgaaatatgttaagacaaaaacgataccgatgaccgtcatagcgattgctgcgtcagcagcgtaaatcataggttcgccagtgacgaaaaattcatctagcttcattatgtcttcccccaatcattacgttatttagtgtaataaatgaatgttattcatgatttgagtgatccatgttttccatttcttcattactcgttttttcgtcttctttcatcttgctgtgatcatgtcctgtaccacgttctagctctttgccaggaatgtatacatcttttgcatggtcaatccattttaaatgtgtaccgttgtaagtttgacgaccaacaacgcctgggcttaggatttgatcatatttcttttcagtcagtttaccagctgtaccttttacatcactaacccactctttgaagtctttgtccgtttgagcttgaacttcgaactgcatttgagtgaaatgttcacccgagaagttagcactacgtcccatataagaaccaggcttatcagcttctaagtataatggcattgacatattgttcatcgaatatttttgtccgccaagttctggtacccagaatgagttcataggtccttgagccgttaactcaaatttcactggcgtatctgctggaatgtttacatagttaaccgtctcgatattttgttccggatagctgaaaatccatttccagtttgcagatgtaacgtgaatcacgattggatctttatcctttgattctgccggtacttcttctgcagagtagatcgctttaacagttggcactgctaatagaattaagatgatgattgggaaagctgtccaaataacctccatctttaagttaccttcttgctcaggtggctcatagtccatgttttcaggtttttcacgatatttgacaagaacaaatataaaaatagcaaatacgacaacaaccacgatcaacatcatccacatagaccaaatgattaaatcagattgcgtttttgcaacaggaccttgcgggttcaatacagcaagttttgaacaaccgctcaaaaatactagtgaaagcgcagatagtaaacctactagcttccaaaatcctttttttggtttcacttaaaactctcctttctaacaacacatgatgcgaagcctatattgatgaacattcaaaatgcgctatctttcgctagataacgacatttttatacagactctcttcccccttatttgtaggccactactattgtaatacaaaatgacatttttttcgtcccttttgctttatttttttatattaaaaatattctaatatagtgactgtaccaatggggttagagtgcttcaaccttgcgatattctatcacataatttggtatgaataaatgtaaataaaaggattcagctcccatttcttaactatttctttaggaataactgcaaaattagctttgcatgtttgcttcaacattgatatatcaatacacatcgacataattgaatattttgtgacaaattttcaaagaaaatgtgacgtcctgtatgaaacttattttgcccgttaattcccttttattttgtagcaaatatttgatttttttgcttaaaattctttctttcgaaaatatgaacaaaacgtgaatttttttaaaaagctttttattacagaaaaaagctgcgtgttactcacgcagctcttgatccataaattctttaaccgtgatatcatcccctgctttatccagcagcgttgtcgttgctggaaacggatgtttaatatgactcggtattttttcatacagcacaaaataatcactttttggaaccgcggcatcaattgtatacgtatcgtgcactaaagccgcctttactcgctcaatttgtttacttctatttgttcctgtaaacagcgcatatgtccctttatttgtatggatatcatcataatccactaaattgctcattttggtactgacttcaatacgcaggcgtttgttccatccttgcttcaatacggccattccttctttatcaccaggtatggagaataaggctatgtatgtattagagtgatcaacccgtttaaaatcttgcagcgtaatccttgcagaaccatcaatactttctttatgctcccaatttcgcaaatgctgctgcacacttgccgcattgttttcaatcggatatcgaatcatttcatacgcaacaattacaaccgctatacaaatgaacagaaatagcaaccgctttatctttcgcacatctattcaccttccttagcttactccccttttatgtaattgcctaaattataacttcctattaaacctctgtctatgcactaggagaactacgtttttttttaccacaaaagggatttttcaaaccttttgtcataaaaatacgctaaaagactcagtagctgttgaaccaaaagaaaccgatccctgcccccccttctcatcttcataacaaaaaaagatacccgttttgacacaggtatctttcagcttatatatcacagctttccaaaaggaaaccctataaagggtcatttgctgttctttttattacacacatctttccgcacacatgtatcccttgacctggtacccatgttttttgagctgacgaatgcttaaatttcgggaaatgctgtcaggaacaattacaaccacttctttatatggaatttcctcatgctgtctctctaaataaggaagcggaatatggattgctttttgacaggggttttgtttcatttcatgaaaatgacgaacatctacatacgaaattgttgtagaagcacagtcgacggtcgtcactttctttattccctgcaccggcacatagcgtttataaaaactgtaacacattaataaaagtaaaatacctatgctcatatatagtatcgccatgttttcctcccaattaatttctatacccctgtatgtatactatattcgaaagaaagaatcaacacagaagcactctatctcatttctctctgaaagaaaaatggtctttttacactttattatgaaaccacaataaagtgacgaaatcaatcattatttattttgatttttcgaaagatttaaatactagtaaacagatcgttttttcttattataatgaagaaacgcagaatttttattttcatttcctcttttctttcccgttaaaactgaggttcgcttatgagtaatacaatacattagaaccaatgttgcacaaacgttagaaaaatgattctaaaaatgaaggatgcgagataggatagtatgaacacgtgaagggagagatatgatgtttgatttgtactatgttgtattatttacagatcaaggtgaggtagcaggcacctgccccatctatataagtcccgaagaagacgttgaaaaagaactgttaaaaaatatcactttgcataaacaaaggctgcagtcaaaaaaagaaaaagtgttttattttgaccaggataaagaggatatgacagatttatcagatcactatgcgcacatcctgacatttgctaacaacgacagccaaattgcaaaatggctggaagaagcacatgaaaaactgtgcaaaaccggtgaactttttgtggagaatggttattttcagcgtgcttttatgcattacattaatcaaaaaagcaatgttttagagaattactcgtacgaagtttgtgaaaaatcagtaaagttcatatatcaagcaagagactatattgtaattggatcagaaaaatacgagttaacttaatgcaaaaaaaggaaagcttcagtttcagaagctttccttttttaatcaatctccatcaagatttgcccgacaattattatgagataaagatgcattttgtgcctgatgctgcttttgctccctctgcattgtcatatctgtttgtttcgttcttactttagcgatgtgtttagttttatttccttggtttaatgtcatgttcattcccctttctggtggatatagtgtatgagaataactcacacgccataagaggaaatgatatgaaaaagcccctcttaaattgagtgagctttctgcctaaaactgcttttccttttattgctgaatccgcatgaaagaatattctctattttaaacgttcgtttctcgttccttagtaagcaccaagcttttacgctctgaggataaattttatacacaataataaatcgctgtgtcaaacatcctttatcgtccatataaataatttcaacaggtcgttttgaagagtagctttcttgaagtagctgtcgcatagaattcgctcctttaatttttagtttaccgaacatatgttcttttttcaagtgttttaaactgaataattctttagcttttacagcttaaaacggggaaaagcatagggaaaataataaaaatcatacaaatattaggtaattgtgatatggtaaaagggattacttaagttgggagaggtgcatgatggaaagtaacatacttaaatggatccccgttccttactttcaattaaatcaagaaggtgaaatccttcatttttctagtcaagcacattcttatttttcttcagtctccagtctgtggagcattattcataaagacgaccggaaacaagcaatgtggatgctgtcacagcactcctcatctaaccccatcatcaggcatttgcgtttaagaacgaccgatgatacatttgtgaattttaaatgcacgattcattggaaaaatggtgtagggcatttagtatgtaccgaaaagaagaatgtcaaggatccgttagatgttgtattatctgctcaatcctatttagaaaactcggacaaacgattaaaagagtcggacaaggtgttaaatacttcagcagatttattatttaaccgattaaaacgctaattaagtaaacaaagtctaagctatatttcattatttctatcatttttaaaatcattaaaaggctacctacaggggtggctttttgttttgttctgcctgtaaagtcattctcttttcgcccgcaccatttagtacagagtacatacactaataggcatactttctatatttatgttttgctcagaaaaaaattccgaatactcaataaatgtttgaacattttttaaaattgacatatattataaacaaacaatcatttgaatgtttgaatgaaggaggaaatcatgccaaaagaccgctgtgatatttattgttttaatgaagaaaaagtaaatcgtattaagcctgctatcgatgccgaagctgttcaaggtgtttctgccctgttcaaagcgttaggagatgaaacgaggcttaaaattgtcttggctctgtataaaggcgaggaattatgtgtatgtgacgtagccaatatagtaggctctacggttgctactgcttctcaccatttaagactgctgcgtaatataggaattgccaattatcgcaaagaaggaaagttagctttttattctttaagggatgcacatattaaacaagtaattgatatcatgtttgctaaaaaagaagacgtaaccatttaagtttttcttaccgtatagggagtgggacacaatgaaacacgaagataaaaaaagtcatcagcataccggaagctgctgcagcggatcttcttcagcagaaattgaaagcaagacctgctgctcctcttcttcagaagccgcatctactgaagagccttcttcctgtggcacaaagagtcatgaacacagtcatagctgttgttcagatgcgattgcgttaacgaccgataaaagccagcattcttgctgcagtgatcacgatatagtaccaggcgacagtgacatagaagaaacggctgaataccgcgtatatggaatggattgcccttcctgcgccgcgacgattgaaaaaagtttaaaaacattaaacgatattcaacacgtaactctcaactataatacaggaaagctccaggtagcggcgacaagtgagtcagctctgtcactcattccaagctcagtagaaaaactagggtttaacattgaggctatccaatcaaataaaaaaatgaaaacgtatttgattgaaggaatggactgcgcggcttgtgcgaacacgattgtgaatcatttaaaaacagttcctgctgtcaaagatgtacgcgttaacttttcaacgggaaaagcacaaattgagcacgataacgaagccgatgacattattaaagaagtatctaaagctgggtataccgctactttagtaactagcagcaggcagtctgctgagtcgcggcaccataaagggcaaaatggaccgattgttttttcgggtattttcatcgcattaggttttatcggttctcatacaggaattgcttcttatatgataactgtactctacgctattgccatgattgtcagcggatataagccggctaaaagtgcttattacggaattaaaagccgttctttagacatgaatgttttaatgaccgttgcagcacttggagcagctgttattggtgaatggcttgaaggtgctacggtcgtttggctatttgctttaggtgttgctctgcaaacaaggtcgattgaacaaacaagaaactcgatacgaggtttgatggacttagctccttctgaagcatgggtgaaagaaaacggccagctgattaaaaaagcagcgggagatatttcaatcggcactacgattgtcgtaaagccaggagaccgaattccgctagatggtgaaattataaacggcgaatccagtattaaccaagctcctattacaggtgaatctattccagttgataaagtaatcggtgatgctgtttatgcaggcaccattaacgaaagcggatcgttagaaattaaggtaacaaagctagtggaagatacgacgatttctaaaattattcatttagtggaagaagcacaggagaaaaaagcgcctactcaagcatttgttgataaatttgcaaccatttacacgcctatcgtctttattttagctttattcattatggtcatccctcccctgtttgatggtgcatggagtgagtggttttacaaggggcttgaattattagttgtggcttgtccatgtgcgctagtcatttctactcccgtcgccattgtatctgcgattggaaatgcggcgaaaaatggcgtgctcattaaaggcgggacgtttttagaaaaagctggtgcaatcaatgcgattgcttttgataaaacaggaacgctaacagaaggcaaaccagccgtttcagaggttgtttcccttgctgctgaagaaaatcagcttttagcgataacaaaaacgcttgaagactattcgaatcaccccattgcccgtgctatcgtggattatgcagaggagaaaaaagtcggttctttacaaggatcaaattttaaaatccttacaggaaaaggcgtgcaggcaacaattcaagaaacggtttattacgcaggtaatgcaaaattattctcagatttagaaatacctctatcccactgctggtctcatattgaaaagcttcaaaacgaaggtaaaacaattattattgtcggaacagctaaaagtgttctaggtattattagcgtagctgataccatcagacatacaaccgtatctgctttagaaagcctcaaacaaaacggtatgcagcaaattgtgatgttaaccggtgataacgaaggaacagctaaaatgattgcttctcagtctcggatagaccgctatttcgccgatttgatgcctgaagacaaagtgaaagccatacagcagcttcaagatgaaggctatcaaacggctatggttggagatgggattaatgatgcccctgctctagctactgctgatcttggcattgcaatgggcggtgctggtactgacacggccatggaaacagctgatattgttctcatggcagacaatttagaaaagcttcctcatacgatgaagctaagccgtaaagcgttagctgttatcaaacaaaacatttggttttctattattgttaaagtcattgccttagcttttatctttccagggtggcttactctgtggattgccgtcttaagcgatacaggagcagcgctacttgttattttaaacagtcttcgcttactcaaaatgaaaaattaaatgtaatccataagctttccagcaggcgttggaaagcttattctctaggagggtttacgtgaataaccgctggaatcaatttatttataaatgttgggctcctttttacgatgcgttttttaataacgggatgttttatcgagccagaaaaaaagtctttcaagacgtccacttttcatctgaacagcgcattttatttgtaggtgttggaacgggtgcagatttagcttttattcctcatgaagtaaatgtaacagccatcgactattccagtgaaatgcttcaaaaagcaaaagataaatacaaaaatccatctataacctttcaccaaatggacgctcagcggctaacattcgactctttttcgtttgatgtagttgtagcaagcttaattcttagcgtagtacctgatgcggagcaagctttaaaagaaatgacaagagtagtaaagcctaagggaactatcctgatttttgataaatttgaaactaaaaagaaatcagcggcttttcctaaaaaaatattccgccctttcgtaaaattactaggaacggatattggactctcttttgaatatgtgtttgaagcaagccgggatcagcttatcttgaaggagaattcaagcgtcatgttgaaaggtatgtatcggaaaattattttgcagaaagttgatgaatgacttcaaagacgaatgatgcctttttcacatgatggatgtacatattattgtctagctttaattgaagaaaggatgaacattttgatgataaaatcaaaggtcataacagttgtccttgcagcaagcatggtctccggctgcgaaaacgaaagtaaagaaagttcaggcaacaaacgtacagaagcaacacaacatgaagaacatcagcagcacacattaggtgataaacgagaagaaacaaaaaatagtgaaactcttccctcttttctaagtgacaagcccgaagacatgcagcttatttatgcagccgctgctaagcatcaaaccttactagaaaacattccttgctactgcggatgtggagaagaagctaatcatcaaaacaactacgactgttttatctttgaaaacaaagaaaacggcgcagtgacatgggatgatcacggaacaaaatgcggcgtctgtttagaaatagccgctcaagctgtagtagactacagcaaaggcaaaagcattgaagacattcgtcaagaaatcgatgataaatataaggaaggctatgccacacctacgcctacgccagaagtatgatgcttcagtataaaaatcagtaaaagactttgatttctttattcaaagtcttttttgtcattttattattagttgataaaaccttatttgacctcacctttttaagtccttctaaaacgccataatataaaaataacacatttggacgtttatttactgaaccctcagggaatatgctttctaacacccaaatataaccatgagaggagaaaaaaactatgagtaattctgtagaaacaaatcattcagcaaaagttgaaggagcaattaattctatgagcgaggagaaaaaagaggatattctctctagcttcgaaggatttaaaagttatctagggaacaaggtctcaaaaggtgaaaagttagggatgaacgaagaacagctggctaaaaccgctcagaaagtagctgattaccttgctaagcatgaagagccgcgcaatcgagaggaaaacctgcttcacgaactgtggaaggttggagacaaagaacagcagcatcatcttgcccatatgcttgtaagattggttcaataaataaaaaagatgacacgctgccgtgtcatcttttttatttacagatattaaacagctggaatgataatttgctggccaatttgtaattttgcaggatctacgccggggtttgcatcctgcagctgctgaacggtcatgctatattttttcgcaatgctatagaacgtatctcctgcttgtacagtatacgtagtgacaggaagaacaatttgctgaccaatttgcagttttgcaggatctacgccagggtttgcatcttgcagctgctgaacggtgatattatacttctttgcaatgctataaaatgtgtctccagattgaatggtatagaatgtaacttgattagaaggtaagtttaaatacttagcaattccacgcgcgtgcgcttctcccacttcccgaagaaacgtagcgttttttaatttttcagcgtcggctgtcgtatcgataaacaagttttctgttaaaacagctggcatatttgtttcacgcagtacagcgtaattagccgtttttaaaccgcgatctgcaatcgttccaaatttccgcatgattgttaaaatttccgtgtgcagctctttttgtaaaagagaagattgacttccctcttgtgatggataccgatacgtttcaaatccagtaccgctgccagcattaatgtgcatagaaacaaaaatatccgctccccatgcattagcccggttcgctcgatctgataatgaaacaaacacatcggttgaacgagttacttgcacatctacggaatagttatgttctaaatacgcccgcgcgtgtagtacaagctgcagcgtaatatctttctcacgcaaattatttcctaaagcgcctgaatctgtaccgccgtgtcctgcatctagccatacttttttcatgtgaacctttcctttcaatcataatatgaaagaacttgtgattaacaccggctttgcctgatgttttatctctcattctatatatatatgtgattggacaagaagggttcgtccccttaaaacattcaaaaaaattcacacaagaaagcaggattttgctaggtattctccgctgttttaaagcacaaaataaagacggataaatgagctagcgtgaatctcgttactccgctgttgatttctgtgcaagacttcgctttccgcgggagtcttcgccttgccctccaatcaccagctagaagcaactgcatacatgaaacttacttttaccatagacataaaaaaatccgagcgaattggatttatcgttcggatctccctttaactaacgtccacgccttttaatggagataaaaagcaggttcgccatcttatcttctgctatttctcactaaaagcaatttttaagccaataagcgtaaagatagagccttgcacgagattaagccgcttagacagagctggagattttcgcaaaaactctcctactttccctgcaaatagactaattaacgtaaaaataatcagcgcttgaactaaaaatacggcgccataaacaagcatttgctgtgtggcgtgtccggttgaatgattaacaaactgaggtaaaagagcaagaaaaaagagcgaaacttttggatttagcagattcataatcactccttttttatatagcgccttgtactcaacggcttctttgttgtcaacagcgagagcggaatcttttgctgtaaacgtcttataagccagatataataaataagctgctccagcgtattttacaatagcaaacgctaaagccgattgatagataacagccgatagacccaatgttgctgcagctatatgaccaagcaagcccgtacaaagccctaatgaagtcgagattcctgcatatctaccgtttgatatgctttgtgctaaaacaaataagttatcaggtccaggcataaccgtaagcaaagcggctacgcctaaaaaagaagtgattgatacgatatccataagtcgttctccccctgcatgattttgcccaccattatagcattttttactatctagtattcaaaaaaaataaaatccattcctaaaaaagcagcctcaactattcaggctgcttttttactacttatttaatttgtttttctatgatctgttctttagctgaggcagtctgtgcttccgctgctttcatttcattattaacattgattgcttcttttaaatactcggttttgtatccgcttttaagtgcccaagcataaaagaaaagtgcaacaattgcaataagacccatatcccagccgtatttaataatattgagtcccccgaacttttcacttcctatccaagagattgtcatcatacataataagtagacaatcatccaaacgccggctcggaagttttgaccaaagcctttccattttgattttgcttggtaataaaaataaattggcaaaccaattaaaataataaataatacctgtccagttaacggccatcttgcccagtaaagagtaagtgaagcaaaaataaatccaagaggcgctattacgtttaacccttttatacgtaaaggtctataaagctcggtccccgttttccttaacgtcatagcggtaataggaccggtaagatatgaaattaatgtagctacagaaataatttcggctaaaattccccagcctctaaataaaaataaaaagatgaatgagacaaataaattaaagaacatggcttgacgaggaactccataaagcggatgaactcgtcccagtatattcggcaaatatttatttttttccataccataaatcatgcgtgacgtggtagctgtatacgtaatacctgttcctgatggcgatacaaaagcatcggcatataacacaataacaagccagttaatatttaacgcaatcgctagatcggcaaacggcgaattaaagttaagatgactccatccttttacgatttctgaaggatttaccgctccaataaacgcaatttgaagcaatacatagatcacggttgcaattaaaattgagcctactactgcaatcggaatagagcgagctggattttttgcttctcccgccatattaatagggctttgaaaaccgttaaaagcaaacacaatcccagacgtagcaaccgctgtcaaaacgcttgcccatccatttggagcaacgcctcctgcaggggagaagtttcctccgtgaaaccctgcaaataaaagagcaccaattgtaagccctggaattacaatcttaaaaacagtaataagtgaattagccttcgaaaataagcctacggtccaataatttagaagaaaataaatgattaatagtcctgtagcaatagccaagccttttccagtaagaatcccgttttctactaaactgcctgtccatttcgcccactcccacggccatgaactcatatactgaacagaagcaaccgcttcaacagggataaccgatacgattgcaatccagtttgcccaagccgcaataaagccaagaaatgagccgtgcgagtattgcgtatatttaaccatacctcctgcttctggaaacatcgatcctagttcactgtaagaaagagctataaataaaataacaaccattccaataatccaagaaacaattgctgcggggcctgcaatttgagcagctctccatgccccaaacagccatcctgatccaataatagatccaagaccaaccatcatgagagaaaacgttcccatttttctatgtaagttattcatgtatctaacacctttcttctatattttctgagaagtgagttattaagcgctttcattaaatttaaaaaataaaattcattttgaactttaaaaatgctgcttaaaaatactaaccaaaagcttttccgttcatttacgcgtcccctttcttcatttattatttgttattatatcatcatcaaggtaaaaagtacgcgttttgaataaaaaatatttttatttttagaattttgtgctttttttcaattaaaagtacgcgttttgaacactaacattcataagagttgcctttccattaaagtgatatacaaatgatcttgttgcgataaccagaaaaaaacaggataaaatgagcgcttcattttatcctgcttttttaagttatttcacaactgctaataccgtttctttaaagctgttataaacatgcgaccaaagagctggttcttctttatatcttgtttgtaacgaagaaaaaacttctttttgtttttcttcaaacgaaggatcttcttttgaaggaagcgtggcacgaagctcatcgacgatttgctgaacttcgggagcacgggggccccacttcccaagtagcgtcccttcattattaaaaattaaaataatcggaatggcacgtcctccgtttgttaagtgacggtcaattaattcggtgtccgcatctcgcagtgcaacgcgcacatcgataccggcagcttcagctactttacgaatgattgggttaatcatcatcgcatctccgcaccaatcttcagtaatcgctaagaaatgaagcttgtgagcctttaatttgtcagccagttcatctttaggaagctgaaattgttcataaacagctaaactttcctcttttaatgtactcatgtcgttcatatatgtttgaattgattttccttcttcaaaatactgctgttctgttttcatcaaaatccctctttcttttttgtatacgaatagatgagatgtaaaaattcggtttactcttttctacacgcactactagtatagcttttaagcacagtgaatcaaaatataaaagtcagcgcgttttttagcctgcgacaggatttacaaaacttcgatttaaaaacagcacattgagatgttataaaaaaagagaatggggtacatgtacactatcaatgtaacaaattttaaatctttgtgaatatttgagaatgtttattgtgtaaccgtcatcttttgattatgataatgatatgttagctacttgactaaatatggaggatgaggcaaatatgaatcaatccccgcatgagaagcgaaaaaaacgcaaacagtttgtagaacgtttaaggctaaaaggaatcaaaatagagctgacaaaaccgcgctctcacttttcttcactatccttattaaaatcataactcgtaaccacctttttctaaagcggaacggtatcgaatttcaactatctatgctaaggcttacatatcatttcaaaaagaacagcttctaagtgctgttcttttttgatacttttttatatttctgcctctgttaaaaaaaattataaacctttttctttaattcctcctttttctatctagggctttccactccctttcttacggtgttctcaagatatatagttctataaatcccttaaattaccactatattcaaggtatatataatataagtatatattgtaaatttataactcttcctatataatcttgtagaaaacgtaaaaaaaggagaaaattgatgaaaaaactgggggcaatactattatcatttctgctgtttgttggcgtatttccaacgtcttcattcgcagcagtgtcaacatttgacgcagatttcaacaagtatttaaaatcggtaagccaaacgcgaggctttgaagtaaccaaagacgacgttgaatattcgctttcactgtacgatgaaagtcttaaaaacttcgatacaatcgcagatttagaagattttttaggtgaaccaattgcagctgacttacataacgtgcaagatgtgtatgcagattttgacttagacaaaacaagcttaaatgcgttattaaaagagaacggccaaagcttagacgattatgtatacctagatgatttatacgatgatgtcggcttctatctagagggcgacgactggtatgaagatgacgagtcatatgacgaagaagacacttcttacgatgatgaattaagcgaggaagatttaagcggcttactatcatttatgcagtctgaattaggcttaacttcagaagagttaaatcgaattgaagcacattttacatcgttagaagatgagctttcaaatgaagcaacgcttaaccgcttagatcaattaggcgagcgcttagcggcattcgaagattttgatacagcaacagaattatctgctgatcaaatcgctgaattaatgtctatttataaagaaatgctatcaatcttccatttagacgctaaattttcacttgtacaaggcggaaatgaaagaccgctttctcttactgatttaatcaacttagaagaagtaaaaaatgcaagtctaaaaatttctctttatacgacagacggtaaatttttagcagacatggtgatcacaggcgatatgtttaattctgatatcatcacagacacaggaaaagaagtagaaaaatctgctgaagctgtagcaaaaccagctcaagcacaaaaaccagcagtagaaaagacacaagaacctgtgaagaaacaaacgaatggcgctgtacaaaaaaccgttaaaggcggaaaacttccggaaacggcttctaattatgtaacaaatacattaattggattagtgcttgtagccgctggctttgttcttttccgcaaagtgagacgcgcataaaatggaaccaagaaaaacaagaagaacaatcaatcgcaaaaagcggttgattgttctttcccttttagccgctgtcatctgctttggtctttggtttacaacaacaaacgcctataaatttgcaagaggctatttggcatttaaaacaatggatacagaagaaccagccgcagcttcagtttctaaaagcaaggacgcttcaacagcagactcttctgctgaagcttctgctgtggaagctaaaaaaacggtacactctcgtactgctagcccggaaaaaaagccgaaagtgtcaaatgtgtcttacccgaaacagccaaaaatcggtgatttaatgggagaattatatattcctaaattaaacgctaagctgccgatctatcacggtacgaacgaagatgaattagaaaaaggcgtcggtcattttgcgggaagcgtgctgcctggtcaaaacgacaattctgttctatcaggacatcgcgatacggtctttcgtaagcttggcgacgtgggtgaaggcgattcgctcgtggtggacacggcagcaggcaccttcacatacaaagtgaacaaagtacgaatcgttgatgcggatgaccggactgttattgtgccaaagcctagagccactttaaccgtcagcacctgttatccgtttaactacgttggttcagcacctgaacgctatattttagtcgctcaccttgtgtcatcaacaacaaaataaaaaagctgtccttaaaaaggcagctttttttaatgaatagatttcattagtaaatcaaaccatattttcagcgaagtcgccgtaataacgatcgctaagataacttgcagcgacgctaccttcgtcttttgcccaacaaaagcgccgattggagctgctagtaagcttgctccaataatcataagcgccggaagcaaaaggacttgatgcgtcattactttaccgaatgttgttcccatagatgaaataaacgtcacggctaatgagcttgcaatcgttacgcgcacaggaatttttaacacggtaatcataataggaacaagtaaaaatgcgccccctgctccgacaatccccccgcaaattccaactaaaaacgccagagctgctgccaaaggttttgaaaacgtcacttcgaatgaatcggccgctggattattttttttgggcataaacattaatcctgcagcaattgttgccatcacgccgtaaatgaaattgatcattccttctgaaaacgagtttgatagcgttgaaccaatgagactgccaactaagacgctgatacccatatataaaattaacggtttattcaaatagccgccctttttgtaagcaagagctcctgaaacagacgcaaacagcgactgtacggctcctataccagctacttcgtgcgcgctgaacattcccactcctacaagaggcggaacaaatagcaacagcgggtacaaaacaactgatcctccaattccaagcatacctgctaaaaatgacccgaaaaacccgagtgcaaataccgttattaatagttgtacatccatgtttttaccacctgcttttatcaatccaatatcatgtttgttataaagtatgtatacatacaacgccttatctcttcttccattgtatcactgtatatgcttcttttctgtaaaaatattgataaaagtgctttcaattattaatttttttaatcattaaaatcctatcgactttatgtgttatttacttgtagcctaaacttcctcgctctcctctctgttacttgtggtagaataaagaaaaactagatgttagaactgcctacacgctacgcttatctcagcaggcccatcatcacaggaggctttcgtatgtttgaatacaaaattgatgacgaagttagtttgcatttgattgaatcaactgacgctttccccttgctttctcttattaacgagtcaagaccttacctaaaagaatggctcccatgggtagatagcatgcaaagtattgctgactacgatgaactcatccctgaatggagagctcaatattataataaccaaggattccaggccatcattcggtactacggagaaatcgccgggatgattggttttcacggaattaattggggaaacaaaagtacaagtctcggctattggattggacatgattttcaaggaaaaggtattatgacaagagccgtacacggatgcctgaattatgcatttaatacgttaaaccttcatcgagtcgaaatacgctgcggtgttaataacgaaaaaagtaaagccatccctacgcgtctaggttttacagaagaaggtatttgcagagaaggtgaatacctatatgatcactaccatgaccttgtgatttatggcatgttaaaacacgagtggaagcaagctccttatgctccttggcttctttcttaaaaagcaggatcatttggacaagctatcgtttgaactgactatattggaaaaattaaaaagaggttgaagacataacgaaatgaatccagcctaaagacgaacaaatgagatacttgaactgaaccgcttatgacaccgcagttgatttccgcgcaaggcttcgctttccgcgggcggccgctgagcctcctcgtcgcttgcgcttctgcggggtctcacctgttccgcttttcccgcaggagtcttaaccttgccctccaatcacctgctagaaggaacaagacagatgaaactatattcaccataacaaaaaaacgaacggttgatcacatgctgatcaatcgttcgtttttcacttgggttaaaacccttttgtcccagcctcttttttttagttgaaatactgaagctgttcgcggcgaagcttatctttttgtttgtccgaaattgagtagtcgtagttataaatagctccttcccagtctccatacattggatttggaaatacgattagcttttggccaaacgtttctttttgctcttctacaagcttatttcgatcagtaatggactttttatcaaagccgctaaaatcagataagttatcaccaaacagcaggactacattatgatttgtcgctactttttgacggcgcgtttcttttccttcatcttttggacccgttaatagcacatggtctttggttgcttgaggaatatgtaaattctttaggtttttaattgttgcctcaagctgagaagttgtacggcccgaaatatagtaaatatctacacctttttgatccgcatacgtcaagaattcaacagcacctggtactgctttcgcttttgctgcttgcacccactcatcccatttataaggaaatccttttccggttttgattgctgaagcttgaaatgggctattatcaagcacggtctcatctaaatccaaaataatggcaggctttttatcggtactttttgcaagcgcctcctctaaacgaagctttccagtattatagccttggtaatacaaagctttcatttcgccggatttttggtaccaagcatcggccatgatttgctgatcagctaggtgttgagcgggttcttttttctcagcagacacttctttttcctgctgaggggcacatgccgtcagtgaaaaagcaagtacacccacccctgtcaacgctgataatttcttattcatttcgcatccacttccatctctacatatttttatgctaataatgttatatattacctcaattaaacataaaatcaataaaaatccgaattatattttaattttagttaaaaatgttcgttttaattattttttctccctttttttaaccattatccaaatatttgtttatacattttccaaaatccgtttttctcattctttctttgtaatctttttttagaaacatattggtttatcgctcattcgcttcaaaaaacttaataaatctgaattatctaacttttaatcttgtgttagattctctcacaaaagtgcttttttttgaaaagatatatagtaaaatagattttgtgaattaaaagacggtgttttctatcgaaagtattgtataaatatacaaaaggggatggagatatgaatcacgtaaaacaatggggatggattacctttggctgtttgtgcgttgccatcgggattcaatttttaaccgcttctaacctcgttatcggcggaacagcaggacttggaatcgtcctgcagcatttaaccggtatttcatttggggtattgttctttatcatcaatttaccattttattttatggctcttacgcaaattggtctgcaatttaccataaaaagcttcatcagcgttagcctgatgtcagtgatgtcggatttattagctgccaacttttcgtttgcgcttccgcatccgcttgtagctgcgattgtgggcggcattatcgtcggcattggactgatctttttgtttcgccacggctcttctcttggcggaatcaacatgctatgcgtgtttcttgataaacgctttggcattaatccaggtaaaacaatgcttttgacagatgtgttgattgtaggctctgcaacagtggtattcggcgtagttcaagttctttattcgttaatcggtatcttcatcatgacaggactgcttggacgctatcacaaacgctcgccaatcgaacgaactggtgaacatatggaagaagaagcgaaacaacaaacggcttcaactatgtaaaaaaaccgtgcgggaataatcctgcacggttttttacgcttattctgctacttttacaagctgttttcctaagtttgctccttcaaataaaccaaggaacgcttcaggtacattttcaaaaccttctacaatgttttcgctgtacttgatttttccttgctgcacccattcccctaactgcttaatgccttcagggaatttgtctgcatagtcggctacgataaagcctttcattaacgcactgttaattaataaaggtgtttgaacacgcggtccaacatcttgtttttctaagttatacagtgaaatttggccgcaaagcggtatgcgcgcaaatttatttaataagctgacaactgcatctgaaatctctccaccgacgttttcaaagtaaacatcaacgccattaggacacgcctctttcaacgcttcttttacatttccttttttataattaatcacttcatcaaatccgagctcatcttttaaataagcaattttatcttcagaacctgcgatgccgacaacacgtgcgcctttaattttagcgatttgaccaacaacagatccaacagcacctgctgcaccggaaacgactactgtttcgccttcttttggctgaccaatttcaagcagtccaaagtaagctgtgagaccaggcataccaagaacgccgatagccgttgtaattggcgctagctctggatcaactttctgtaagttttttgcttctgcagctgaatagcgtttccaaggaagcatacccgtcacgatatcgccttctttaaagcgatctgattttgattccgttacgcgtgctacaatgccgcctgcaagcggtgcgtttagctcaaatggaggaacatatgattttgtatcgttcatgcgtcctctcatatacggatcaacagaaaggtacagtgtttgaacaagtacctcgccttctttcgctgtaggcatttcaattttttcgtatttaaacgtatcttttgttggcattccctttgggcgttctgctaataaaatttgttcattcatcgatattgctcctttttatttctctgttttttgtaaaatgtgctaaacttacctttgttattttaaattatatattgtgcacaacgccaaaaatatgattgtgcaataacaccgaaggagaaaaagacatggagctaattcgctgtaaagaagatgttgttaaaaaactaaacgagtttgttgaagtaactccccccgttattttgtttaaaaaaggcaatatgtatccgattaaaatggatatcaactacaactggattgccacggacgaacaagggcatgagcatattgtcgcttcaaacacaaagaatgtgcaggacgactactggtttagctaccattttgacttatattaaggagtttcccggatttactcctcgtaaacgttatataaataaagtgttgcattcgtaaaaacagcgtgcgaattcccgcgctgtttttatgtaataattagagtatcccaagcgtgtgtttgaagctttgatcatgttccattttctgcatcgatatctacttaagattatgttacaatcacggtaaagtaatttatgattgatagaataaaagctagagcttgaaaaattcgaggtggattatgcaaggtaaagttgtatataaagaaggattttcagtgataggcatagcaaaaaacggagagtatcaaaaagagaatcttttgaagcaaatacttaaagaaaaagaaatgattagctcttcaaaagaacctcatatggttacaggcatttgcatggctccgaaaaaagaaaattatttttatattgcagggacagaagtggctgatacggcttttattccaaacggtatgagcgttcatacgtttccttcgtttacatacctgcagtttaaacacagaggtcccattacatcgctcgggtcgacgtacaacagcatctggaatgaatggctgccgaactctccttacagcatgattgaaggtcctgctcttgaaattgtaaatacagctatacacagcaatttatatagtgatacatatgaaatggatatttatattcccataaagctgggacaataaaaaaggtgaacttacgttcacctttttcctatttttgcagctgtttatataaatgataaagagcaaaaacgcactctggatgacgctctttatggttaaaaaatccgtgaggaaacatgagtgaaagattccctttttcaattccggtcacatacttgttttccataagcggatattctttcacaacccagcgcgcttcgtcaatagttgacgtaaccatttcaccaaagtatacgcccatacactcttcgaattcttcttttgtcattgaaaaatagtcaaagcagttgctgtcttctagatcatagtaaagaagctctaatattttcaaactttcatctgtaaaatcaacggtgaattcatctaccgctttgcttatttcatgaatacgattcatgcactgttcacgcacttgatgatagtaatagctagcttcaaactgatgttcacacgtcactaacgattctccgtatgatgctgttagatcatgatgcttgctcatgctgacacctccacgctaagcttatggagcaagtataacattaaccaagcagctattgagcatcttccattaacaacctatccgtggcaatattaggttcactttttgctcattattctgccgtacacaaatcctccgctaacaagaagaataccgctaattaatacgctgcttaaaaaggtttgcgaatgcatcaagtggttatacaccatccacacgctcatttcgtcatctccttttggccttttttaactagtatccccgattttcttaccgcacatgccggctttttcatcattttttcatcaagcctctatatagtgaaaactgtgaagccaatcatactttttttcatcgttttactccttaaaaagcctgcttatgactctaaagcaggcttttttttatatggtgaaacgagtaattaagccgtctatccccactaattgtgcatagtaaggtataattaaagatagtttcacttttctaaagtgagaaatacatatgaggcatcaaaggagacatgcaaatgacagaactcgaaaaagcgaaaattcagcaccgaaagctgtccaagggacaggtatttggtagggccatcgccattgcgatcggtgccctgctcatggccacaggacttgaaatttttcttgtcccaaaccacgttgtcgacgggggaattaccggtatttcgatcatgctttcgcatattactggcgtaaatctaggaatctttctttttgtactaaatcttccgtttgtatttatcgggtacaagcaaatgggaaaaacatttgccctttccactatttttggcatactggttgtatccatcttaacttctatgtttcatgatgtccccgcgtttaccgcagacgttcttcttgctaccgtttttggagggattattctcggaattggaattggactcgtaattcgctacggcggagcgcttgacggtacggagatacttgccattttaatcagtaaaaaaattccgttttccgtaggagaaattgtgatgtttttcaacttcttcattttaggagcagcgggatttgtgttcacgtgggaccgcgccatgtattctatccttgcttacatcattgcagctaaagccattgatacggttgtagaaggattggaagaatcaaaatcagcttggattattagtgatcattctgatgacattggcgatgcgattaatgcgcgtctaggtcgaggcgttacttatttgcacggtgaaggtgcttatacgggcgatgataaaaaagtgattttctgcatcattacgcgccttgaagaatcaaagctaaaaaccattgttgaagattttgatcctactgcctttttagccgttgcagatattaccgaagtccgcggcggacgctttaaaaaacgaaacattcactaaaaaaacgcgcagaaagcaccatgctttctgcgcgttttttatgtaagagatactttttgaacccgcttaaaccattcataacaaagaagcacaattaaacataagtcgattaaatcgcctccgtaatacatcagcatagccccttgctgcgccccttccgccgagacgtgcataggcgggtgagcatacacatattttgataaaataccgtgagcagcaagagcaagaaccaatacggatgcccggtgcgtaaaagttttttgatgcggcgaaggatcgattgaaatcatcgatacggtgaataaatagccggctaaaaacacgtgaatatgtacagcgacatgcacgaaaaaagagtgatgcatcatgccatacagacttgttgtataaagaatccaaagtcctcctacgttaagaacagaagctgtcaccggactgctgatgaaccgaacaaaccgcccttttaaaagttttgacacttttctggctgcatgaaccggaagcgtgcgaagcagcagcgtaagaggtgctcctaccgccattaaaagcggagctagcatacctaaaagcaaatgccccgtcatatgcgcagtaaagtccatatgagcacgggctgcgagcggtccggctacagaagatacggcgcataaaataccaagtgtccagctggacgtcctatataatgaccattttctatacgttgcattcgaagacgctgcagcccacatgtataaaaaaaaggcagcgacaaaaggcagggctaataaaagctgagacaatatttcatatttaatcatgatgtgcaccttgtttacgtgcaaaccatgttaaaatgatgccaataagcagcattaaacatgcaagtacattccacgtaatgtcgtaaggtgcaatcttcactccgtaccggatttgatgaagtcccataagcttgtgctgcacgatcccgtcataaagctgaaacgccccggctccaagcaatactcctcctatccaccttttcacccaccagccgcctcggcgccttagatctgccactataaaaagtgatgcaatcgtagcgaaccagctgaatgcatgaaacaaaccgtccgacactaaaccagcggccgttgaggacttatcataaaaatgatgccaatgaagcagctgatgaaacactgcttcatcaataaaggcaactaaccctacgccaaacaaaaagcctgaccagctatttcgagtgcgatgaaccacgcgctgatttgcagttgcttcgtgtttcttttccatatatatacctccctggcagctctttaagtttatatcgattctaatgtacgtataccctattaaagagaaatgaatctataatatggaaaaataggaactatatcctaatatcgttttcaccatcttttcaccataaaggtataggatagtacttacgaagccaattagcatatttttttcatagttttactccctttctaaagacctgtttccccaaagcaggtcttttttatatcccgcttctcttttcaccattttttcaccataaaggtataggataatacttgcgaagccaattagcatatttttttcatagttttactccctttctaaagacctgtttccccaaagcaggtcttttttatatcccgcttctcttttcaccattttttcaccataaaggtataggataatacttgcgaagccaattagcatatttttttcatagttttactccctttctaaagacctgtttccccaaagcaggtcttttttatatcccgcttctcttttcaccattttttcaccataaaggtataggataatacttgcgaagccaattagcatatttttttcatagttttactcctttgtgaagacctgcttccccagagcaggtctttttttatatcccgcttcttttttcatcattttttcaccataaaggtataggatagtacttgcgaagccaattagcatatttttttcatagttttactccttttgaagatctgcttccccagagcaggtcttttttatatcccgcttctcttttcatcattttttcaccataaaggtataggatagtacttgcgaagccaattagcatatttttttcatagttttactccttttgaagatctgcttccccagagcaggtctttttttatatcccgcttctcttttcatcattttttcaccataaaggtataggatagtacttacgaagccaattagcatatttttttcatagttttactccctttctagtgacctgtttccccaaaacaggtctttttttattttttctaaaagcttccatcttttcaccgttttttcacttttcttttgtatactaagtttgtcaaagcaatttcatcatttttcataaatgacccctatttattccccgctttttgtgagcggggctttttttgtaagaaaagcatcttttcaccttattttttaaaaaagcttttctcttttcaccgttttttcacttttcttttatatactgttcttgtcaaaacaatttcatcatttttcatagatgtaccctatttgcacccgcttcttggaagcgggactttttttgtttccatacaaaaaagcttaacccggaggttaagcttttttcgcctgcttgcgaagaacaagcatcataattgtaatgatagtaaacgcaataaacgctaaaaaaggaatggtgataaatccaagccagttaatatattgacctgagcaaggaacaccgcttgtacacgtttcaaatgctttaagagccggtatcttctgcaggcaataatgatagcctgaaagcgtcataccaatcactgaaaacggcaggacgtatttgtagatgaacgtatcattccgatacacggctacacctagcacaatcgcgagcggatacattaaaattcgctgataccagcaaagttcacacggaataaagtgaagaacttcactaaacgtcaagcttccaagcatcgcgataagcgctgtaatccacccgaagaccaaagacttgttcattatttgttctccttagccgcatctttgaccatttgatcaaagtcatcgattgtttttccttcgaattttttgccgcctacataaatggttggtgtacctgtgatgcctaaatgattggctgtcttcatatcttgatcaaacgcatcttttccttttccatctttaaaagcactcgctacttttttcgcatcggcatcgctagatacttctttcagcgtatcttctaagtaagattccgttaagacatctttcttttcatccgctgcgttttgctttttataaagaagttcatggaatttccaaaatgtatcgttcccaagctctttatataccgtctcggcaaactctgctgcacgagatgagtcattgttgataaacgcatagttcataaagtagaatttgactttgcctgtatctacataatctttttgaatcagcgggaaaaaggattccgtgaagtttttacaagccggacatttgtaatctccaaactctaccacttctaccggagctgactcttttccaagatacggctgattatcatatgtaagagcggccttttcatctcctccgccctttgacatattagaaaggacgattaaccctaaaatacagaccgcaataattccaatcacccaaaaaatccacttgctcgaggacgtttgctgattgggcgttacttttttctttttctttgcttttgacacaatctcatctccttcttttctttctctcttacaaacttacaaagctgttagagcggtaaaaattagcgcacacaaaataaaaaacacgtatagcgacgtcagcgttaaaatgacaggaggctgcatcggcattttcgtttccggatttaaaatatattgaatgcgataattaaccgacgtatcagcaaacgatacgtgcgcacacgaaagacttgtctgtcccgttttaaccatttttaaaagggcgctgccgatgtgagcagacgtgccatttttcacaatggcatcttgatcagccagcacttcacgcatgactttgaaacgtttatggctccatttaataaacggaatataccataatgcagaagcaagcgtgcttagtaaaaatgttttgagcggatctttgtttgcaacgtgtgactgctcgtggtaaataacagcttctagttcattttcatcaagcaccgagagcaaccctgtagacagaacgatatgcggtgtaaacaaccccattgttaatgcaatgggctgatctgttgttaaaactgttaaattctttccgtacgctttttgcaggtgagccgttgttgtttcatttcgcagcttcgtaatcattttacggactttccgcatttgaatcacttgctttacagctttaatgaacagtacaaacatcgtatgaaaaataaccgcattcagcatgtattcaataaaaaacaagccaaaaaagtgggctactttgttacaaagtaaaattaagttaaacgataaattccatccaaacagcaaatgcagcacatacatgcccatttgcataagcaacgtcacggcaataaaaaagcacaggttaaaaataagcttagaacgctttagtattccttgattcattgattattcatccttttttaactgtttgacttttgattcgagcatgcttaacagtgaatcatcaacttcttctaacgcatcaagcatatgagtaacagcaagcgagccaaattcgtcgatcaattcgtgcgttaactctttcgactgagcgtcgataaattcctctttagaaagaatcggctgatacatcgacgtacgtccttttaaacgcttttgcaacacgcctttttccaccaatcgattcataacggtcataacggtgttgaagttcactgctttttctttctcaagcacgtgctgcacatctttaatggacatttcacttccgttccataaagccgtcataatttttgcttcaagcgggccaaaaaagcgattaaggccggtttcgttaaatttgaatttttcaattttcatattcgacacctcacactaccaattgtagtgtgaggtgtcaaatccgtcaacttttccatgacaactgccttacaattgtcataatcacttttttacttcatcggttaaatgctgaatggatagcacaactgtatcgagcttggcttcaattcggtgaagtaaataaagcgtcaccacaacgggaaaaccaacgtctgagacaagcgtaaaccactctgtcatcttcctctctcctcgtatattatatttaagccctatttaggagctaagatctgtttccatattaattaataaactaaataacatattacttggatgtctcaagatatttctagataatgatcataggatcatttnnnnnnnnnngttgatattcctgtaccccctccccgccgtttgagtaatggggggacgcagtaggatagggtaagcgcgctgctggatatgcgcgttcaagcagttaggctgatgagtaggcaaatccgctcatcatgaannnnnnnnnnagctgtgatgacgagggaattatagtaccgaagttcctgattccacactgccaagaaaagcctctagcgaggcgggaggtgcccgtaccgcaaaccgacacagggaggcgaggagagaatcctaaggggatcgagagaactctcgttaaggaactcggcaaaatgaccccgtaacttcgggagaaggggtgctctggtagggggtatagcccgagagagccgcagtgaatagnnnnnnnnnnctgcgtaataaactgcgtcgcctacttggaataggtcaacttcttctccgatttctgtaataattccgactgcgtcccaacctaatattcttggcgtcgtttcgattttgtcttttggcgcgcgttgttttgtatcgactgggttgaccgaaatggcttgaacttggacaagaatgtcgtgaccgcttggttttggcgtttcgagcgtgacatcaaggaaactttcttcggcttcgattggcaaatatttgtataatcctactgctttcattttgcaacacctcgttgtttattattccccgtcttttgagaaataatgcgtaaaatgcatatttttttgcataaaaacaaaaaagaacatgagggattatccaaactttcatgttctttttaggttttatttttttatatcggcaatggctttgagtgggttggcgnnnnnnnnnncaagagaggtatcacttttaataccttgatacgttactgaaaaaactcctggtcaacagcaggagttttttctgtttttaagctgtatacgatatacagccttagttaacataatgtctctttccggtacacatcacaaaaaagaacccttctcgcataagggttctcataaggctacgatttctactttatgcagctttttatacatccttggtgtcacaaggtttctcttagcgatgaaagtcagaaaagtgtataaaaagcccaccttttatacatatgctcaaagttgccttacattgatttaattataaaatagtcgtaaaattattctgactacttttatgatttgtaatgttgtcaaaacccttaatataaaaagccgcctctcttagggactgacccctgtttttgagacagggatcaaaacaccttttaaacgaccagttgccgatattgtacaggtgactggttgtttagttttgtttgaatacgggcattgttatagtaagtaatatagtnnnnnnnnnncatcacagctcagctttcatgatgagcggatttgcctactcatcagcctaactgcttgaacgcgcatatccagcagcgcgcttaccctatcctactgcgtccccccattactcaaacggcggggagggggtacaggaatatcnnnnnnnnnnttttttttcaagcagaagacggcatacgagatgtagagaggtctcgtggtcgcacaaagcccatcatcatttgtcctaagccttgaatcgtaatggatagaacgcctgcaccttctggcttttcgacgcggcgcaccatgcttcctcgtatttcaaaaagtccttcattccaaggcgcagtctcgtcttctacttctacgtaaagcacggtttctgaacgattgacaaagcggtacttctctaaaaaggcctgaacgtccacgattcgcatcatgaaatccaatacttcgcgtttttggaagtctggggatgggaaagcaagggcgatgtcacgcaaggaaccaacatttttcgcgacaacgcggtctaccatcatgttgtgtgaacttacaaaacgccaaaggcctttctctgcctcataatttagtgctactagctcgtgaattttaaatacttcatggtcaagcgtaaacaacatataacccatcgtcgtgccgttcatatcgcaatacacagcgatttctttcgtatatttccggcgtgccattcgcaaccaccaagcgtcgtcgcgcatcatcatgccactttttttcgttagggcaaatcggttgtagagttcccgaacgacagaaatccctgtgccgtcatcactcgtcattcgcattactcgacccggcactgtacccatgtctggcaacgcgtgtgctgggatttcaagctccactttttctgtgaatacttcgtagccgaacttgcggtagaacggaatcgagaacgggcttaaatnnnnnnnnnnttacagacgcagtcgtatccggcgccagactgtgatctgcttctttcactatttcaaaagcctggtgcagcagcttttccaccttttttgtatccattccggaactgacgctgacctggatagaggcagagggcttttccgtcgtccggtttttaatgacctgttcaataaaatattgattcgggacaatcagcgtgccgcttttatcgagccggaccgacgtggcacggagattgattttttccactctgccggtttcctcattgatttcaaccgtttccccgacttcaatcgggcgttcaaataaaatgatgatcccggatacgaagtttgaagcgatgttgcgcatgtcgaagccgagcccgatcccgattacgcctaaaacnnnnnnnnnnccttaggattctctcctcgcctccctgtgtcggtttgcggtacgggcacctcccgcctcgctagaggcttttcttggcagtgtggaatcaggaacttcggtactataattccctcgtcatcacagctcagcnnnnnnnnnnttcttatgtgataaaaaaccagatcatgctgtccctccgatgaatttggcgggattagtgatctggtgttttgtttagagtcttacgaagctttgtttgctgagttcgagcctaaatattgatttcgattgtgtagcttggtttcgcgatttagttgcacacacctgcagaaaaagtcaaaagaggaatttttctgcaggtgtgcttcgcttttctcttaatgtgttgctgttttaccgttgtaaacattgccttggcgagcatctactgtgattgtttcgccgtcttttactaggtctgtagcgtttgttgcgcctacgattactggaatgcctagtgtgatgcctactactgctgcgtggcttgttagaccgccttcttcaacgactactgctgcgcttttttcgaaagctggtagcatttctttgtctgttgttttaacaactaagatgccgccttcttctgcnnnnnnnnnnagaacaaaacaactgacttcaatcacatcatgataaacatcactgtgatatctacgtgcaggtttgagcagagtaatggcaggcgcaattattaataagagaatgaactctcaaaactgaacaaagaatcaaaacgtacgtcatataaaaatccttataaagtaggttatccagccgcaccttccgataagactaccttgttacgacttcaccccaatcatcnnnnnnnnnncttgataataagggtaacatcttcgatttgggttaatgtcgtttgacgcttagagcgacaagggatataacgaaaaaaacttgccttttttaggatactaatgtagtgttttaagtgtctagttcaaaacaaatacattaatcccaaaggagcaagtttttatgtctaaaagtttttcaattgttactgaaaaatatacacctaaaaagaaaaaaaatctagcattattgaattttattaaaccattaatttctggaagtagtttagaaattataaaggagtgttcaacttttcttatgtttgcgagtgatgaaacattggaacataaaaaacaaataaagggcaattcttgcaaaaatcgattttgtccggtttgtgcgtggcgtaaggcaagaaaagacgctttgaaactctcaatcttaatgaaatacatacaagcagaacatcaaaaagaatttatttttttaaccctaacggctcctaatgtatcggctgaggatctcgataatgaaattaaaaaatataatcaatctttcaaaaaattgatggaacgaaaagaaattaaaagtataacaaaaggctatgtaagaaaattagaggtaacctataaccaagaacggaatgactatcatccgcattttcatgtgatgatagcagtcaataaaagttatttcaataagcctactcaatacataaaacgtgataaatggcttgagttatggcaacaggtaacggacaatcctagcattacacaagtggatgtccgtaagattaaacagaacaatcataaagagatttctgaagttgcgaagtactcagctaaggatagcgactatttgattaacgagaacgtctttaagactttttacaaagctttaaaaggtaaaaggcttattgtgtactcaggactcttcaaaacggcttctaagctctttgaagagggtgaaatagataaatacaaggaagtcgatacaacggagtatatttatgctttgatgtactcttggggcaaaggtaaatatgtcgaggacgaaaaacgaaaactaacagaagatgagtatcgaaagcttaataaaaagttgatcaatgaattagagattgaatgaatcccgaagcgaattaaaatgagcaagggcgcacttatacattgttccaatgtgtgcgattgcttcgcaataaaaaacaaaacatcctttgcgatttaagcaaaggatgttttgtttgctaatcggtatctactcttttaggggtactgcattaatacaaactttgtaccggtggtggaggcgtcattgccttttgttaaaatgagcaacttgagttgctttgaatcggcttaagccgataagtgttttggaaaaaggtttttggttttcttttttacttaacttgattatagatacacataagtcaaaaaagtttactggagtagtgaaatataaacaagcgaatttgaaaagggtaaagagcgatgaagatcgctctttttattttttatttcctgtcccgtagggtaaccatttctaaccacgttttttgtggtgtgtaaatgggcgttttctttatcggcacttttgaaaaaagatgctgcacaatttggctatgccaatcaaccgattaaaatcggttcgcaatgacaaaacggagttatgtataattgcgccatgtgtttctctacctggatatttttctcctcaaaatcgagcaaagtgacacgaaaggttctaggaaacttcttagcaaggcaaaacaaagttttggggatgtggtcacgatcccgtagcttgcccctaaatttagtgagtggtttatgacggaggaaaaaacgtagtctttttgttgatgagaaaacccttatagtaaaatttcgtgaagtaggccccagagggcgaattttcccgacggggtatgctttacgggattttaagggtagaggctcgcaaccaaaaggaaacggctttttctgagtaataaatagcgaatggagggcgagagaaaacacaaaaaaacacccgcaaaatcgagggcgtgaacgttttttttcttatcttgataataagggtaacatcttcgatttgggttaatgtcgtttgacgcttagagcgacaagggatataacgaaaaaaacttgccttttttaggatactaatgtagtgttttaagtgtctagttcaannnnnnnnnnctattcactgcggctctctcgggctatacaccctaccagagccccccttctcccgaagttacggggtcattttgccgagttccttaacgagagttctctcgatccccttaggattctctcctcgcctacctgtgtcggtttgcggtacgggcacctcccgcctcgctagaggcttttcttggcagtgtggaatcaggaacttcggtactataattccctcgtcatcacagctnnnnnnnnnntatttatacactgtatagacttttgatatcttcccatctattttatatgctaagcataatagtactcagttactgtttctttttattgagaaagtataatctaaagataaagagggctaaatactgatatcccaaattaaatatcagtaaagtaatgcattttataaaaaaaagacagtttctcctacaaggagaatactgtccaaaataaatgaaattcacttattatttatttggaatcgaactatggaaataggtttaattaaatatctatatgtcttcttcaaacaagcactatctctgagtaatagctatattattctgctagaggagcaatattaaaatttagggaaaagttttacgtacagtatgaaggaaggcaaaaagaaactaaatacttttcaaagtaatagttccctcttacctactccaagggagatagaaagtcagtcatatcttatgctctatttaaactatcttttttggggtaccctggctacttttctttacatagagagctttccaaagctcatgcattttgcttcgcccactattaatctctgggttgaattggatcgcagcctgttgacgaatggcgtggaccttttgtattgcttgttgcatttgttcattaattatatctaactttttaccagcatatttggtgatcgataggcctgctactgttccttgagccatggcgattttaccactctcaataccggtgatattaccggctacaaatagcccttcaagaggagtatccatcgtctctgaatgatgaggtacgtgaccgcctaattcaggaatatattcaaatggacatccggcaatggcagcaagctctgcaagtggatataagccacctgcgatacagacaaaatctgcttcataaatcatttcagttccagcaataatattgcccttagcatcaatattagccacacgcactccttcaaccttatctctaccaataatctcgattgctgcttttcgaagttgtagaggagtaccatttattttcaagccgttttttggatataagttcaagccggcttttctaatccagtcatttttcataaaatggcttccaacacgtaataactgcgatggggcaagatgagatgcatttaagagtgatttcaagacctcctcgggattacctgctttttgactaagaggacttttttctgggaggataatccgatcaattgctattccagctaactgtaattcatttaaaattgcaaatgctagaatatttgctccaataataatacctttcttcccaacctggacacggtggacattcgtcattacttgagcagcaccaattgacattacaccaggaagtgtccagccactcagtgggatagggtattcagcagctcctgtagctaacagtaagaagggggcttctagtgcacctatgctagtatgaacattccatagctgatcttctttttctaagttataaacggatacaccacaatgtatattgactgatagtttccgtgcttcttgatggaggcgttcagattccttaatcccattccaccattcaccagacggttcttgatgaagttgtccaagcaacctgccaccaggctttacaaattcatcaaggacgactactttgagaccagactctgcacaggcaatagcacctgctaaccctgctggacctgctccaatcacaataacatcaatcatggcttttccaccatccttcttacgatattcgggtgctgtttaccactctcaattaccatatctttttctacaagtgttaggcaggctcttacgtttgactgttcattcacagttacacgacattccaagcaatggccaatattacaataaacccctctaggcgttccactatcttcatggacacgtagttttcttattccatttgctaaaagggcggctgcaattgtttcattttcatacgcctcatatctaattccgtcaaattgaaaaaaaatacgcgttctatcaccaaaatctcctaaaatgggatgctgtattattctattcattggttttcacctactgttccaaatgtgactggacgaattggaggctggtattttaacggaagttcaccaggcaaggtatcagggataacagtttcgataattttatctaatgtggacctgcatgtacgccctccacaaaaacccattcctgctctagttcttaactttaattcccttgcagtacatttatgttcatcagctgttgattgaagttgtccataagtaacttcctcacaacgacagataataattttctctttattagtcatttgaaattcctcctctatgttcctttatgaaaatattatgcaaaaaacatgccaacatagagggggaagaggcttaatgtaagccaagtcgcttcagccggttgtataaagtagcccttgtgattccgagttgtctagcgcatattaatttatttccatcagaaagatgtaatgctctttcaatgacttttttctcgtgctgatccatttcttcctgtaaggacaaaatggtggaaacactttcgatatgtacgttaggttcaatatttttacttttttcaaaactaatactgtttgaattaaaaggtaaataacccctttttattacgccgtctgttgcaaatacaacaagtcgttcaacaacattgcgaagctctctaatattaccaggccaatcataacgaagcagttcatgtataacttctggagatagttcgtgaattggtctgttatagttcaatgaaaaatcatttaaaaaataatgagttatttcaataatatcttcttttcgctctcttaaaggagggatatgtagactaaccacattcaagcgataatataaatcttctcggaactttccttctttcattaattcactgagatcacggtttgttgcagcgatgacacggaaattgatattaatctctttttctccacccacacgataatattttcgttcctgtagcacgcgaagaagttttacctgcatatcaagtggcatttctcctacttcatcaagaaataaggttcctccttttgctagttctattttgcccttttttcctttattgtcagcgcccgaaaaggcaccacgctcgtagccaaataattcactttcaaataaagacgctggtatcgcaccgcagttaattgaaataaaaggtgcattaggctcttcacttgcttcatgaatagctttagcaaatacctcctttccaactccactctcacccaatatcagaactgttgatttaacagaacaaacttttttagctaaatgaaccgttttttggagggcagcgctcttgcctttaatagaattaaagggatcagatgagtccttgtattttgctactgcttgttctaaacggtgtacttcattggacatgttaaataatttttcattgagcacgacttgatttgtgatattcgtctctgagaccactgcccctataatctgatcattgaaataaacaggattagaattaattaagacaaacaggtcagacctaggttgatgatgttggctcacaatgctttttccttgatacaaagattgcaggatttctagattttcatagtcaaaaaaatcggtaattggtcggccaattatatcttgatgatccactgagaaaattttttctgctccgtctgtccacgtgcagacgcgctcattattatcaatgaccgtgactgatgaatccgtagtttgaatgacagtttcataaaatgcctttaattgattgtaagagttatgaagaaaactgatcatttgagttgccgttatgcagcctataggatttctgtttttgtcaagaataacgactatagaatgatgagtaaacgcctcaattaagatagagaatgaatcatcctcataaatggacttacatggaagctcaactgtttgttccgttagacgataataaaactcactgtttctctgtataatgtgatgcttatctaaagatgtatccattacaagcctatttattatttcttgcactgacggaaatgaaaataccatgatatcctcccaaattgtaaaagtttattaacactgtcaaaaaaattatacatatgtttatttaattttcaaaatattttttacattaaattgaattacattgtaatttcttactttgttaaaggttaactttagttggcacactatttgcattattagattataaaagccatttgattgtagggaggaacattatgtggaacattgcgatgttttagtgattggtggggggattattggctgttcgattgcctattatgcttccaaatatggaagagatgtaacggtaattgaaaaaggagaattcgttagtggtacatcttcacgatgcgatggtaacattttagcgattgataaggatccaggttttgatagtcaaatgtccttatttagtcagaacttagtggacgaattaagcagagaattggagcatccctttgaatatagggcaccaggaagtattctcgtttgtgaatcagaagaggagatggaagccgcacaaaaatgggtgaatcgtcaaaaagctgccggtttaccattccggatgctagatcgacaggatattcggcaagattcctctttttttgctgatgacttattaggggggttggaatgtgctactgattctacggtcaatccttatttattagccttttcacttcttgagggggcaaagaaacgaggggctaaggccttgaagcataccgaagtaacacagatgaggagagaagagagtggttcatttactgtagaaacaacaaatggtggttttaccgcaaatcatgttgtgaatgctgctggagtatgggcacctcgaataggagagatgcttgatctttcaataccgattgaaccaagaaaaggacatattatcgttgcttcaagacagcaacatgtgggatctagaaaggtaatggaatttggttacctaatttctaaatttggtggaaaacgtcgtgtagatgcactgaccgaaaaatacggagtggctctggtttttgaaccaaccgaaagtcaaaattttctaatcggaagcagtagggaatttgttggatttaatacaaaagtaaaaaatgaagtaataaactgtatcgctaaacgagcaataagattttatccgaaaatggcagatatgctgatgattcgttcatatgcaggattacgtccttggacagaagatcatttgccaatcgtttcacgagtggacaaaattcctaactattatattgcagctggtcatgaaggtgatggaattagccttgcagcagtaacagggaaaattatagaggaactaattaacgaaaaagaaacgtctattcctattgagccaattagttttaatcgctttaaagaaagggtgttaagcagatgagggcagaaagagtttttacaacaattgatacacatacaggtggaaatccaacgcgaacattaattagtggtctcccgaagctactgggaaaaacaatgtcagagaaaatgctttatatgaaaaaggaatatgactggattcgcaagcttctaatgaacgaaccgcgtggacatgatgtcatgtctggtgctctattaacagagccatgccacccagaagcagatattggtgtgatttacatagagacgggtggctaccttccaatgtgtggacatgacaccataggagtatgtactgccttagttgaatcagggttgatttccgttcaggatcctattacatccttaaagttagatacaccagccggtctcgtggaagtgaatatttttgtggaaaatggaaaagcaaaagaagtgtccttttgcaacatcccagcttttcttttaaaaagcatttctgttgatgttgaagaatttggacaggtaggtgttgatattgcgtatggggggaatttttatgggattattgacgccaaatcagttggattagagttaactcctgataatgcttcccacataattgaaaaggcaattaatattcgaaataccattaatgagaaatttgaaatcgttcaccctcaacatccatttattcgaggattaactcatattgagttttttactgaaccaacttatgagaaagcagacgtgaaaaacacagttgttgttcctcctggtggaatcgatcgatctccatgtggaacaggtacttctgctaaattagctgtgttatatgctaatcgggaaatttcaattggagaagaatttgttcacgaaagtattgtcggttctttattcaggggatgtatacttggaacaactgatgttgagggtgtagaagctgttgtgaccaaaatcgtgggttcagcctggctgatgggaatgcacaaatttttttacaatgaagaagatttgcttaaagaaggatttctacttattccgccaatggaacatgaaatggaggaagtgtaatgaatattcaaaaggtatactcaacaatagatgtgcatgtagctggtgaagctttccgtattattaaagacttaccattctttcattatcaaagtttagagcaactaaatgagcaactccaagaggagtttttagagagcatccatcttcttttaaatgaaccacgtggatctgcaaatttaaatggctgtcttattgttccagccgttagccaagaagcagatgctgcagttttattttttaattataatggaaaggttcctcttcattacggtggtatcgttgctgtaattacaactttattggaatgtggtcacttgcacccaaggacgtccagtgaatacaaaattgaaacgctcagtggagtaatttcagctactgcaattatggaaaaggatgaagtgatctcagtcaccatagagagtagaccatgtcaattagtccaaagaaatatccccttgtcttatttacatttagatacaagtttctcactcgtgcaggctaatcaattatatgcggtatttgagaaacgtgatatttctgcagagattcatattgagaaactttctgaattgaagagatgggggcaaacagtacttcaagctctggagtcaataattcctgtaaaaggtgttattctaatggatgattctcatctagaaggtggccagattaaaacaatcaccttcgatgaaaacgagtatattgtacgttctccggggttcgagtcaacaatggcatgttatactagcttgcttgctaacgacagagtgttaaacataaaatcaccattgatgaataaaagtatttttgatagctacttaacaatacaagcatccactcaaacagaaactggatttcgttttatcgtgtcaacccgcgggtttattaccggaatgcaaacttttgtattagatccgacagatccttttccttcgggatttttattaaaataacgttatttaggctacattctttcattggtcatctttatacctaagcttctatatcaaaactttccttgcctatagtgatttctcgaaactattttaagggagggaaagtagttttatttggaaactgaatttttaaaattttctaatattagaggaggagaggttggagtatgtctaacaaaggtaagtttaaaagagaaatatcattaatggatttaacttttataggctttggatctatgtttggatcgggttggttatttgctgctagtcatgttgctggaatagccggccctgctggaattatatcatgggtaattggtggagtatctattttattattaggacttgtatattgtgaactgggagcgtcacttccaagggctggaggaatcgttcgctatccagcttatactcatggccctatacttggatatcttttagggtttattacccttattgctttttctagtctgatagccattgaggtagaggcagctaggcaatatgctgcagcctggtggcccagcttgactaaggaaaactctaccttgcctactttaagtggatggctccttcaattcggacttattgttgctttctttcttttgaattattggagtgtaaaagtatttgctaaatcgaattttatcataactatctttaaattttttgtaccagctttaacaatcgttgttttgttaatacatttgcatggtgataacttttcaagtgttggatttgcaccgtttggtttttctggtgtacaagcagctatttctgcagggggagtaatttttgcttatttgggacttacacctattgtatcggttgctagtgaagcgaaaaatcctcaaagaacaataccaattgctcttattttatctgtaatttcttcaactattgtttatgttctcttacaagtagcgtttattggaagtatcccaacggatatgcttggccagggatgggccaatattagtcatgaatttagtttgccatttaaagatatttccgttattttagggttgggatggatggtttattttattgtttctgatgcaataatatccccaagtggcacaggtaacatttatatgtcagctactcctcgtgttgtatatggatgggctaaaagtggaaccttatttcaaatcttttctaaagttgatgcaaaatcaggtatacccagacctgcactttggcttacgtttgtcttttctattttctggacattgccatttccttcatgggaagcgttaattaacgttgtttccgcagcgctagttttaagttatgctattgccccaattaccacggcagcgcttagaaaacgtgttcctgagctagatcgtccattttgggtaaagggcatgtcaattattggacctctttcgtttatcgttgcatcgttaatcgtttattggtcaggatggaagaccttatcttggctactatcttctcaggttctaatgtttataatttacctattctttaaaaaaagagtgcctacctcacaggtttcttttacccaacaaattaaatcctcattatggctgattttctactatgttgccttaatgattgtttcttattttggtatgtttggtggtggcaagggcgtcttaatttattcaaccgatttagttggagttacaattgtctctctgattagctattattgggcagtccatactgctttaccagttgttcatttagacgatgatgaaattcaagataacgatcatttaaaaataagcaatatagatattccagttagtaaatgacatatcaaatgagtaaaaaaagctaatcaaaaggcaaccgattaatgtatcggttgccttttgattttatcctttgtaatcacaaatgagccctttttctacatnnnnnnnnnnaatgcttttacttctttaaccgataaccctacttccttagcctcttggataagtctaatccattcttggtctaaatgtgacgttattacttcttttttactgtccataaacataaattcctccagattttcaggaggctcagctgtcatagtcaattgactttagacctgtagctttgcgtcctagcttttcaactagtttgcctttatctgaatgtgtannnnnnnnnnattctctcctcgcctacctgtgtcggtttgcggtacgggcccctcccgcctcgctagaggcttttcttggcagtgtggaatcaggaacttcggtactataattccctcgtcatcacagctcagcctttatgatgagcggatttgcctactcatcagcctaactgcttgnnnnnnnnnnaggattctctcctcgcctccctgtgtcggtttgcggtacgggcacctcccgcctcgctagaggcttttcttggcagtgtggaatcaggaacttcggtactataattccctcgtcatcacagctcagcctttatgatgagcggatttnnnnnnnnnntgattaacgtattttattaaaaatagagttaactattacttatattgtagaaaaacccacaatttgtcgtcatctagagtaaatgatacaacttacatttttataagttagttataccttttacacatccactataaaaactttcaatctgtaactttgcattaatataatatagtaaataattaaaaaatagaaagaaaaggagtgtgttgtgtgatcaatagttctagtaaaatcattatcattgaagatgtgatggacacgttagctatatcatcaaagaaaaccatttatacatacctttaacgaggaaaatcaatctatttgtcgtcactgagagtaaatagtaaaatttataatttaaatgaaatactttactatttacttattaaaaagttttttatagattctgaacgtatgttatggtcacaatcttcacaagtatatttaccttttgtattttctttaacttgcttaaaattcaatgtaccttcatatattttaaattttttccaataacctgtacgaattaattcataataaaaaatcacaaattccttcttcccttaatattagtatataaaaacatttgaaaagagatacatcagatgaatagcttatacacatgtagttaccattatgtgaattataaaaatcaggtaacaaaaaatcctcatgtaccacgagctttcaatgctaaataattgagtaagtattagtttttgttgactttttttaataaggattttataatactcattgtattttaaattctaaggaggattattaaaaaatgacacactttatgagacttcgtttcccaactttgaaccagtaattgaatatgttcaaaggctctgtttgtgtatacagagtaaacgggattagtctgtccttttttaataatctttatttcacatagaaaatatgtaatgtaaagaaaggcggatcattttgcctttctttatttatgtataattttccttcttttttctaagtaaaaggaaggtctatttggtgacgactaccttagcttaccctctaatctaataaggatgggtctcttccctttactcttaatcacaggcagattgcctgtgatttttttatttcgaaaggaagaggtctcatgccaaaaaaaataaaaagtgcaaaacgtgtgaatgagtttgaatcattatttaaatgcccattctgtgaaaattcaatgagggtcgtcaatgacagaagcctaatatgtgctaaaaaacatacttttgacttcgcaaaacaaggatatgtaaacttattgccccgtccctcgaacagtcattacacgaaagaattgttcgaagcaaggcataaaatcattatggaaagtaacttatacacttctatgcataaaacgattacgaaaatgataaaggagcatatggatgttgctatcaatccttttacggttctagatctagggtgtggagaaggctcccatttacaaaaaattgtggacgagtgtaaaagtccagcaataactggcattggtctagatatttcaaaagaaagcatcattatggcttctaagaaatacaaagattcaatttggcttataggagatttagcaaaatcaccgctagtcgatgaatcggttcatgtgattcttaatatcttttctccttcaaattacaaggaattcaagagaactttagttcaagatggactggtcattaaaattgttcctcgtcccaactatttaaaggaactacgagaatttctcttcaacaaaactgaaaaagagatctatagaaatgataaaatcgtgtcgctttttaaaaagcatttctatctactggatgtattcagtttgagttatacaatgaaccttaatcaggcagagcttaaaaatttggttcaaatgactcctcttgcctggtcttcagataaagggcgtattaatacgtatataaatcaggattctgctgaggtcacgatagatttagatattttaattggagtaaataagtaattggaaagaaaattacaatcgcactaataaattggaggtagtgaatggtggaaaaagtatgtatagaattagaaaatattgaactctcctttttagatcaattagtattagatatccctcgactaaccgtacatcagtttgatcgaattgggattgttggaaaaaatggagttggaaagagtacgttattaaaattaatggccggtcaagttatgcccgatagaggtcaaataaattgctttgtagattttgcctatttcgaccagctgactacccccgttgacgaagaagtagactacgagttggtaggaaagctatctatacctcaaacagaggttgataatttaagtggtggtgaacaaacacgcctgaagttagctcaattattttctacctatcatgaagctttattgattgatgagccgacaacccatttagacttagctggtacacagtttttcattgaggaattaacttattattatggtgcacttgttcttgtgagccatgatcgttatgtactagataaccttgtgacaaaaatttgggaagtagaagacggatttgtaacggaatatacaggtaactattcagattacctaacacaaaaagagctgcagcgacagcgacaacaagaacagtatgaaaagtatatgaaagaaaaaactcgtcttataaaggcggcagaggaaaagatgaaaaaggctgataaaattacacaggcaaatggacatatatcaaaaaaggaaacgaaagccaaggcgaataaaatgtttatgactaaatcaaaagagacaagccaaaaagctgttcaacgggcagcaaaagcgattgaacagcgagtggaacaacttgaagcagtgaaggcgccagaaaaagaacaaagccttcattttcatcaaccaacagcgctcaagctacacaataagttcccaattatggctaatcaattaacgctaaaggcaggaaacaaaattcttcttaaagaagcaagttttcaattccaattaggcagcaccatcgcgattacgggaaataacggttcaggaaaaacaactctccttcgtcatattttacagcaaggtgaaggtataacgatgtctcctaaagcagtcattggatcttatgaacaaatcggctatcaatttgaaaaggatgaaactgtactagcatttatgaaagaacgaagcgattacggcgaaagcaagatacgctccgtccttcacgaaatgaactttacaggtaatgatttaagaaaaaatgtccgcaatttaagtggaggagaagcgattcgtctcgtattgtgtcagctttttttaggaagatataacgttttggttttagacgagccgacaaattttttagatgttttttgtattgaagcgttagaacgctttttacaagcttatgaaggcactgttcttcttgtttcacatgatcgcatgtttattgatcgtgtagcagattgtatctatatcattgaacatcaacaactaaaattcaaaaattaatcgtaaaaaaacagctcatttttttactttgactgagataataaatagattaaaaagaattcaatattaaataaacaagccataacaaatcaaaacattgcagaattcatttaaaggaatggattctagataattatatttatggcagaaacgttggaggtactttatggaatcaaaaatcaattctaaagcaatattaataaccttcttgattggtgcattctttgcagtattaaacgaaaccctattgaatattgcattaacagagttaatgaccgtattcaatgttgatgcaccaactgtccaatggttagcaactggatttatgcttgtaatgggtgttttaatgcccatttcagctctattaattcaatggttcaccacaaggcaaatgtttataggtataatgactgtttttttaattggaacatctattgctgcttgtgcaataaatttccccatgctgttagctggacgtatgatacaagcaataggtactgggttattaatacctgttattatgaatgccttacttttaatttatccaactgaagttcgtggaaaagtaatggggacatttgggttagtcattatgtttgctcctgcaatcggtcctactttatcaggggtaattgttgacttgttaggttggcgttggttattcatgatcgttattccttttggtgtattttcaatcttatttgctttgaaatacttgcaaaacgtcggagaagttacacgtccaagtgtagacattttatcgattattctatctacaattggaatcggaggaatcatttatggatttagcagtgcaggagaagatcctcaagggtttatgtcaatttggatcttttctgttatattgctcagtttgattagcttattgctattcgtattgcgtcaattgaagctagatgaaccattattagatgtccgtgtgtttgcatataaaaattatacacggggtatcattctttttgtcattgttattatggcaatgtttgcatctgaaattgtaatgccaatgtatctacaagggcccttgggttattctgcaaaggtcgctggtttattgcttttaccaggagcattattgaatgggttaatgtcacctactatggggagtttattcgacaagtatggaccaaggaagcttatgattcctggtacagttgtattagttggagtcatgttattctatagcaacattaatccttctttaccgatctggtcgttcatccttgtgtatatcgtattgatgatgtccatttcagcaatcatgatgccggctcaaaccaatgcatttaatgaattaccaaagaacttatatcctcatggaacagcgattgctaatacattacaacctatcggaggagcattaggagtttcgatctttataagtattatgagtcaaggtagcaaaaatttcttagaagaacaatctgtctctaaaactgagcaaatgatgaatgaagcgatgacacatggtatacaccatgccttttggtttgcattagctttatgttgtgtagctttcattattgcactatttatcaaaaaggcaagtgcctcagagcatgaacaagtttaaagagagaactgagagcaatctttcaattcgatgagtcaatagaagatttcctataaaagaatcagaagggaaagctgtcgaaattcaaaattgaaaaaaaaagagctataatgcatgcttaagcacgcaaaaacatgtaatgatctagtaaaagataattaagaagtatcgtttaaaggtgaataagtaattgaaacatttagaaaaaataaagctagcttaacacagctagctttatttttagtttatagaattagttaacataatcacaattataggaaataaataatgacatcttatctaataagatgtcattactactgaacttaaacactctttaacgtattttgtttaactgactcatttttatatttctcctggaacttatttaacatagaaatgttcgtttgaacaggaaggttttttgctatattcataagggttcgaacattttgggcctatttctcatattgtattaggtattcataatttatggccctagaaaaggggaggaatcagctttgcaacctacagagaaagtcagggttaatataccatttccatcacgatggggtatccatgctgagatagcaggtagaccgatggtttggggtgtgcttattattaactccattacaggtaacagagtaacgggtacaattaattttcgtggcactcttattcccattaatggatattgggatgagagtgccaaacaaatcagctttgattcaccttatgccacatattctggtaacttaactatgtttgatgattcgactactagaattcgacatcttattttaactgggcgagttattatgaaaccaccttctttattagcaggtaggaatggaacttggattgctacgacagatacaactctcataggacctgccgttaccaacagtgacttgcctcccgttggggcctttctaacatcaaatatactccatagtggacttgaacgttgaggaaatcccttaaaaaatgagagtgttttaaaggggagacttaccaataattattggggtaatcaattatataagggccgaataaaatataaacttatataccctaaacaacttaaaaataaaaaactaacttttttctcactcaaagttagttttttatttttaatgatatagaataatacagcactttataaaattatagggaatttttaaaaagtattataaatgttttcgcatgtttcggcttttggttgataaaagcaatgaagcttatatcgagcaacaagaggttgtttgtaccatgttgaagggcacttttgaggaggtctgaaataccataagctatattttgcaggccaactacgttctcctctgacagatcgacgtgccaaacgtttttcactttctcgtgctctttgatagaaatagcctttttgagtagcttcaaatgcatggggttgataaatcatttgtggaatggttctcagtcctttaaaatcagagcaatttgctctgattcgattaattcctacgtttcctataagaagcatcccttgtacaccctcaccttcaccttctgctctaagtaatcttgctagaagagcgatatctgaagttgtagctttaacaactgccataatttcacctccaacaattatgatatttctttatagcttgtataatgttcttttcactatttcacatcttataattagccccctactcttcgataacaggataccccattactatgggatgaaagaagtagatttttcctctttctatacatacattcctgataacgaagcaaactactcaagagaggtatcacttttaataccttgatacgttactgaaaaaactcctggtcaacagcaggagttttttctgtttttaagctgtatacgatatacagccttagttaacataatgtctctttccggaacacaccaccaaaaagaacccttgtcgcagaacggttccgccgagggttctttttccggagtatgcagctttttatacatcgttgatataacaactattttcttctaggtgattgcggacaggatgtataaaaagcccaccttttatacatatgctaaacacttcaaataattgattttatatgcaaatatcatatattaagggtcagactatttttacaaatttcaacgtaaccctatttttgagctacctcgcttccactgccgaggtagctttttattttgctaatattaagatttgttcaatatagatattctaaaaagggacaactttttatatggtagaaagattaacgacaaacggctactcatcttctagaaaagatcttattatacgtataatacgttatatttatcatattaatatgctctaatttgtagaatataggtacgcatttagaaggatattggtattgtttaatcgaatattaaaaagcacatatagtacaagatattattatttttcataaacagggaaaatgccgaatagaatatattgcggctactataccaattgacagccaatacaaggcgtctcataatagtagcaaagggggaggattagcatggcaaataaaacactcgaatctttgaaagtatctaaagaagagtacactgcgattgtaaaagaaatagaaaaacgatcagagccagctaccaagcgtgaatacagcccagaatacatccgtacagtgaaatcagcgttatcaagaagagccaacagacgtaagcgacaaacggaggtattacctgtggccgtgttgcataggtaaataagccatgattgaaataaataaagatgagatacaatatattccgataatcaaccatatagcatctaaatctgatttagatatgttaactgattcttttgtaagcaaagatgtaagacttgatacatggataagaaacttgtcaaatgcatatgaacatcatatccttgggcttgtttccacgacattaataatgcatggaggcaagctcattggtttctatgcagctcgtgtcggtaatttagaagtcgaagaagatgagaaaaagcaattgaaaggtgaagcatacataccttctgtagagatcctttatttcgttatgcataaagattatgagggacaaggaataggttccatgactatgatggaccttattgcagaccttattgaagccaatgcttatatggctattcgttatctgttttgttggtctgttgatgttcccaagacattgcatttttacaggaatagaggatttgacatgatggatacacaacaagatggtctaaggctaatgcgttttgccattccggatacaagagacattcaactgatttcagaatataatgacgacctcctcatttgatcttgtttaaagaacctttcttttggcaatacatatactacccgtatacttatataggtggtggtatcatgaaattaaatggcttaaaattgagtgactctgactcaaaagaaatccttcaagaaatgagaaacggcaaaaaacattcacctgaagcagttgcgtttatcaaatcggctttaggcgcgcctgaaagacgaaaaaaccgaagaaaattcttataaaaaacacttctaattcagctatattagaagtgttttttgtttatctttgttttttctctttaaaatacattgctattccattactaataacagagttattagtaatggagatacaaatctaaaaaatatcacgtacttaaaagtattagaaatagtataacgcctttataaccgttatatattacgttacattgtttctttttcttctcagtcatctttcccattagaacctactctaatgagtatatatatttatttttttgtcaatttgttatttatttttatgataggattatagggttaatatagcgaaatgattataacgtgttattcataaagctatttataatccgttatataactctttttgtaattccgttataaaggaaggtgaaattatggaagggttacaaggaaatcttgaagctctttattctcccggtgaagtagcgtcacaattaaacattcaaagacagacagtaactaagtacgctaggatttttgaaacggagggttttgtattccataaagatgaaaagggaaacagagcttacaccgatacaaacatttcaatgttcagaagagttaccgatgcaaaaagcaaacctggtataactctcgaaacggctataaaaggtgtaataccaatgtataagaaagattctataactccaggcgttacagaattatctgctgaaaatgaacattataaggaagttacaaatgaaaaattagacatacttatgcaagctcttgccgaacagcaaaaattaatactggagcaaaacaaaaaaattgattccctccaggaacaattaaatgagcatagtcttgatgtaaaagacagagacattaaactattagaacatatcagagagcatcagaaagggagaaaggaggaaatgctactcattgctcaaaatgaagtagcagctgctaaacaagaggaacaaaaaaaaggctttctcgctcgtctatttggaaaataggacaaacccaaaagccgtgttctttttatctaccaaacaaaaagaattaaaagataatcactaaataggtcattcaaaatctcatcctaaaaatcctgcaataaacaaagcctggtgattatcaaggctttgttattttctagcgtaagttaaactaagattcaacttatagactattcttaataattttttgagaaacatgaacttagcttaagttaaggctagttaaccttaagtttaatcaacgtcataaaccagttactaggcagttataaatgcgtagctctgattcagtgaatttgttatacccaaactcctttataaggattctctcatacttcccaggaaggggatacaaaactcacctaaatatctcaaacttccactgttagacagccatctgactgtacattcaatgcgtgaatagcatcaagtactttgtggtcctttgcctctaaactgtttaataggttttcaaccatggtaggcctcatgttttgcttctaaaattcatttatataaagagaagaataaaaccctctcgttgcttattcgtccaaagtaagttcaaaaataagctggtaattacggtcggttaagtcgatttcaatgatttgaacatcttccccgtaccaatccgttccagtaataattaatttggccgtattaaaataaaattcctccgaaaaatgcgggtggaacgtatttcctccctctttctctacagcctcaaactttttaacttctcgtaagtagagatccgcatagaacggatggtctttccaaaaagctctagcgttcttttcaacatgtgatcggatataggtatgagactctttagtgctcatttttcttatatggcgaggatagtctaaaatgtgactctcgataaatgaccccttttcatcataaaagaaatcaccatacagcccttcaattgaaaaatcatcaatatgtgctctaataccaaaatcctcttgttcttctagttcgcggttgacaagaatagtaaggacttcttcttcgttctctgctttcgcaacggcaaaaagggactcccctgcattgatagcgaatagttttgtcacattgtgctccccctggatttaatttgatagtctttcccacagtattcaaatttcccactataggtgattgttttagggtgtacctttaaagcaagggagagtaaggggcccccttcctatttaggcatttattatttaggaatatattttaaataaacatactttattaatactttagcttctaagggatttctacacattttaattaggaagctgtatctttcaactgggcatgttgacgcagtaaagcttgctcctctgggtttagtgcttttcctatatcctgtttcaactgtgccatttttaacaaactgtacgtagaactgtgctcttgtaacaagctttcttcttctgacgttaactcctgccctaaatcttgctttaattggatcatttcaagctgttggtccagagaaagagtttctttctgtgtgcactcattttgcttctgttcagtttttagccaagcaggaaccacttccttacggatgatatgtttaggcgtaaataatgctgttgtttcagcttcagtatgtatgtctgactcagatgcttgtttttctgtattcccttttagtagattggtaaattgattgaatgcaatttgataaacaagacggcacatctcatccagtgatagggtggtacccttatgattcgcctcatggacatatttatctaagcctataatcgctgtataagcgacttcatgtacttgctctttgacaatatcaatctccgtatctcgctttactgcttttgccgcattttgaatacgcgcataaaaatcttttagttgatgcccatatttacttgcatacacgttatttacttttttaggcacacctttgatataagcaaatgactgtgaaacagacattaaatgattatttatatgatttacaggtaaatcaaggttaataaaggcattagacgtttttgggccctctaagcttgctgtatcaacgttttcagcacgttcaggagttgtcacaggagttgtcacaggagttgtcatttcttcttgctgaagcgtttgtacacctgttgtatcatgtgcaaaaaagatctcatcgcaaattcgattaaaattcttatggtttttaaggacaaatacatagctgtcagggtgagtacctgttgtatcttctttaatgtaacgtgccacaagtataaagggtgtatcttttaatgatttcaccaaacgagaaaccgtacttttagatgcgttaaattttttcatcagtgtttctgaacggatcgcttgaatacccgtagctacaagattataaattacgtgatctaacatttccattcgttttctagggaattctttatgtaaagctagttgttgttgtttaaaataagtacggagtgtttccagaaattcttctttttttgtacgaagggtagctttttgttgccataaccattttaatcgtccattgaaggtatctacatcttttaaatagcaagtcaatatcttgttcatctgttcatcttctcctttaaggaacacaaaaaagacactgtctccctggtgaaaggaaaacaatgtcttgatttagatgaacgaagcccttgaaatagatgtcaatttcatataaaataaaaacataagttttatcttatcgataatgaaactattaacaagagacttcgacaagtgttttccctagttgctgtagggggaacggtttaagagtgggttcacactacttaaacagttgaagtcttttttctatccgcacgtttttgttagttatattatagcgttaagtcgtctcataattcaataaaaattagcaaaatatatcaaaacaagtatatttagctatgaatattgttatatgactgtagaaatcaatttcgctatatataacacttcaagctaaggagaagtgttatgcatacatatgcatggagttttcagttaagattctaataagtctaaccttacatggcttttatggtattttttatagactttggcgtattagttgaagcctatggttgaaataggggatagctatatcttaattcatccgacaagttcctcgacgattttaagatgtttttttgcttaatttgataatgtaacttttgaattaagtatagtaaaagacattattcttttgcagatgctgcttcttgtattgttttctttttctgagttaccacaacatcatgatgcaaaatcttctctttatttttccctacatacgcttgcaatgccttcgcaatcttttctgcttcttcttcactttgaatctcaaagtatttctcaaaaattgcgccgacttgaatcagtcgtcttgttctttcttttctctctttttcttttttacgcgctccaacttgttgtttcttcgctctcatcttctcaattttctcttctaactcctgaagaatctcctcatctgttcgcttcttcggcacccatcctcatctcctttttatgtcctccaatgtttaaattaattatatcaaaaattgagataaattggtatccttagcatagattctctcaccagaatatggtataattcccttagattgaagagataagggcgcacttatacatcgtaccgatgtgtgcggttccttcggaacgaaaagacaaaacgaaagacccattcgcctagatggcgaatttcataaaacctgtttgcctatcggcaaagatgaaaccaccatccgacaccttcggtgttcatgatgctgatttagtctaaaacgttgattagcgcactttgtgctctcatcaacttattcctaaaacacaaacccattctcaagaaaggaggaaagaattatggctatttaccatctatcgatgcaaatcatcagtcgttcaaaaggacaatcggctgttgctgcagctgcttatcgcagtggcgaaaaattacatgatgaacgtacagacgagcaaaagttttatgctcgtaatgtacaaccggaaaccatgattctgactccttccaatgctccagaatggatgaaagatcgtaatcgtttatggaatgaagttgaaaaagtagagaagcgcaaagactcacaactggcacgtgaattaaacattgctttaccaattgaactaaatcgtgaccaacaaaaagaactcattcagtcttttgctcgaaatgagtttgttcaaaaaggaatggtcgctgatattgctattcatcgtgatgatgccaataatcctcatgctcacatcatgttaacgatgagaaacctagatcaagatggattcggcaaaaagaatcgtgactggaatgctgattttgcgaatacaaaagaaaataatctcgggtacgtaaagaatagcaaaggttgcttatccatccgtgaacaatgggcgaactatgcaaataaagcgctagaacagactcaaatcaatgaacgtattacccatctttctcatgaaaagcgtggactcgaaacgttaccaatggttcatttaggtcatgtcgcacatgatatggagaagaaagggaagaaaacagatcgtggccaaatcaatcgggagcgccaggactacaataaagctgtggttgatttacaagcttatcgtcgtcaaaaagaagaccacttaaagaaaatgaaggaaaaagagaagcaattcagcttttctacggatatagagaaaacctatattcaaaaagctgcgtctctcataggtcaaaaggttattaccttagaagatattacagcacgccacgaagaactacgcaaaatgagtgatcgtcataatcctattgaacgacactttcatgcacaacaacagcaattcctgaatgtcagtaattattatgatcgtgtgaacgatttaaagcgtgaaatccaacagaacgaagaaaaagtagaggaacttaagaagtcccttaatccgtttaaactcaaagagaataacatgatgaaacgacgtcatcttgataaaatttctgatttagaaagtaacaaagaaagctatgagagcagcattcaaaatcataaagaatctcttcgtttttcaaccaaagaagagttctatcagcgttaccaagaattctcgcaaaagaaggaaaatcgactcaatcagattacgtatgagaaaaaacaaattcaagtcgaaaccagggtactattacaagctgaagaagctattaaacaagccaaaatccgtgagataagctctcattatccggatctcaaaacagctggaaagcatctcacgtacagcaatgcattaaagctggaacagtatcacaatactactcaacaaaatcagtttagactatccaacatcaaacaaagtctagatgctaaccaaaagaagctagacgagttcaaaaaacatcagaaaatggttcgtatagagaaagaacatgtctcaactatgagtaaacaagtagagaagcttggcagcgtggagaaaaagcttgatgaattagacagaaacccaggagaaaaagcgaaacgacttgtctcgaaaaaagctcgtcaagactatgaagaattgcaaagtgaagctaaatatggacgtgaaaatctaaaagagctgggttataaaggacaacaagatttacaacaacaacaaagtcgtataaacacaatggagaaaaccgtcgccccatggttagaaaaagaaataaaaacatatgaaagcaacataaacgctttggatacgatttttaatgctattcaacaagctactcgtagccaagagcaagctcaacaaagacatcaattaagaggaatgagaagcacaaatataaatagatcgaaaaatcaaggaccagaccttagccattagacatacaaaattgccttaaggcaattagaaacaactttaagttgttttagttagattcctaataccagggggatttaaatctgtaagataacagtttccctactacagagtgtccaaccatctctgatcattgacttataagaaataaatgaaaaaatagtggaaaccttagataaagtgagcgcctgtccaaccccttttcattactatgcatactataatattgagcaacctccttgctcttccaatagatctcggctcttacattgctatggagttaaagaaaaaactacttttggggcaaacagtagttttttctgtttttaggctatatatcatatataaaattagttaacataatgaattttataagaaaaagatacaaaaatagtacaagttttatataaaactagcgcttgtcctcacctttattcttgctttgcatattataaattgaccatttctatttcagcatccttctatttttctattgggttcgaaaaaaaactactgtttggaatgcagtagttttttctgcttttcagctgtatatcatatgcaaacctaattaacataatgtactttatcagaagcaaaataagttttataaaaaataatcacatttcatgtttcattttcgatcaaaggggtaaagtactatgatggattggaattttacaagaaacagtctttttagatctgtttctttttttatttaagattataaaacgaataataaatatcaacttgagcaaactaaacaagatgccatccgactcggcatccacaacctattttctttagttactccagaaaaacctaccttttccctaactccaaggtaggtttttctgtttttacgctgtatatgatatacaaaggtagttaacataatcacaattataggaaataaataatgacatcttatctaataagatgtcattactactgaacttaaacactctttaacgtattttgtttaactgactcatttttatatttctcctggaacttatttaacatagaaatgttcgtttgaacaggaaggttttttgctatattcataagggttcgaacattttgggcctatttctcatattgtattaggtattcataatttatggccctagaaaaggggaggaatcagctttgcaacctacagagaaagtcagggttaatataccatttccatcacgatggggtatccatgctgagatagcaggtagaccgatggtttggggtgtgcttattattaactccattacaggtaacagagtaacgggtacaattaattttcgtggcactcttattcccattaatggatattgggatgagagtgccaaacaaatcagctttgattcaccttatgccacatattctggtaacttaactatgtttgatgattcgactactagaattcgacatcttattttaactgggcgagttattatgaaaccaccttctttattagcaggtaggaatggaacttggattgctacgacagatacaactctcataggacctgccgttaccaacagtgacttgcctcccgttggggcctttctaacatcaaatatactccatagttgacttgaacgttgaggaaatcccttaaaaaatgagagtgttttaaaggggagacttaccaataattattggggtaatcaattatataagggccgaataaaatataaacttatataccctaaacaacttaaaaataaaaaactaacttttttctcactcaaagttagttttttatttttaatgatatagaataatacagcactttataaaattatagggaatttttaaaaagtattataaatgttttcgcatgtttcggcttttggttgataaaagcaatgaagcttatatcgagcaacaagaggttgtttgtaccatgttgaagggcacttttgaggaggtctgaaataccataagctatattttgcaggccaactacgttctcctctgacagatcgacgtgccaaacgtttttcactttctcgtgctctttgatagaaatagcctttttgagtagcttcaaatgcatggggttgataaatcatttgtggaatggttctcagtcctttaaaatcagagcaatttgctctgattcgattaattcctacgtttcctataagaagcatcccttgtacaccctcaccttcaccttctgctctaagtaatcttgctagaagagcgatatctgaagttgtagctttaacaactgccataatttcacctccaacaattatgatatttctttatagcttgtataatgttcttttcactatttcacatcttataattagccccctactcttcgataacaggataccccattactatgggatgaaagaagtagatttttcctctttctatacatacattcctgataacgaagcaaactactcaagagaggtatcacttttaataccttgatacgttactgaaaaaactcctggtcaacagcaggagttttttctgtttttaagctgtatacgatatacagccttagttaacataatgtctctttccggnnnnnnnnnnacgatagacagtgcagaaggagcgttgcgaaaccaatacatgaaagattatggtatccagctacatccgattgcaaaaaagaaaaaggtaaacatgatcgaaaatgttcaggacctgctggcacaaggtcgtttttttatgctcagaaacagtaacaatcaaatcttttatgaagaacacaaaaagtatcaatgggatgccgacacgttgcaaagcgatgacccgaaagtcgtcaaagaggacgaccatacttgtgatgcttttcaatactatgtaaatgacaatttaaggaaactgaacttgaaatattaaggcggtgatgccatgtttcgaaccatcctagccaagataaagggggtgctcgctaaaatgggattgatcaaacaaattaataatgtttcacagctggccgccgtacaggagagtgaggcacaatacagccgnnnnnnnnnngacaattacatcggaattgatatcgataagtgtgttgtggatggaaaaaccaatgctttctcaaccgagataattgatacattagatagctatacagagttttctccttcagggaaaggcattcacatcattgtcaaaggtagccttccacaatcggtgttaggtactgggcgtaaaaatacaaagtacggtttagaaatttactcatacggccgcttttttacctttactggaaaccgtgaaaattcaaatgatgtctatgatcgtacgaatgaactagcggaagtatttgaacagtattttgatgatagtgatattcaaggacgagtgaacctagccgactttgaaaaagatgaaattaagatttcgaacgaagcattatgggaaagaatgtttcggagtaagaaaggcgatgacatacgctctttatttaacggtaatgtaaagnnnnnnnnnnctatcgttgatggcggataacgtaggaatgacggtgcctgcctttgtgaaagcaaaggcacagggtacccgcgtacgacagccgaagatcaatcgtgagggtgctctagcaattgcgaaggaattgcgtgccgtgggtaccaatgtgaaccagattgcgaaatggtgcaatgcacgagacattgagcaattgaatgaacaggagtttgagagattgatatacaatctcgatgaaattaaaaagggattagctgaagcatggcaacaattaagctgagtacgacgaaaaatgccaatgcgttactgaagtacgctgagaagcgtgctgaggtgtcaaattcgcttaattgcgatgtggactacgttaggaaccaatttaaggctacaagggaaatatggggcaagaacggcggcatacaagcccatcatgttatccagtcatttaaaccagatgaagtggatccccagcaagccaatgaaattgggttacaactagctgagaaattggcaaaaggtcacgaggtggccgtctatacgcacaccgataaggatcacattcataaccacattgtcattaatgctgtgaactatgaggatggccgaaagtttcatgcacatggccaagaagctattgaccatgtgcgcaaaataagtgatgaactgtgcaaggaacatgggctgtccattgtagaagagcgctcggccgatgttcgctacacattagctgaacagtcattgtttcaaaaaggtgagtcgagttggaaagatgaaattcggacggccgtcgactcttcaaaagaacaagcaactagttttgaagactttcaggaacgtttaaaagaccaaggcgtccaagcaacgctacgaggtaaaaacatcacgtatgagcatctagaatcgaataaaaaggtacgtggcactaaattagggttggcgtacgaaaaggagacgattttacatggctttgaaagacaagttacaagagaaagagagacaagaaattcagcaacaacagtcaacagaggatttgaagagaatatacgaagagatgattttgcgtctcagagcgacagagggttatctctcgacgttcctgaaagaaaatatgaacaaagagatgatgatgcaacaagagctcgaacagatcaaacagacgagccaagacgtacaagcggaaatgagattgacttcgctgacatcgatcaacaaattagagaccgccatcttagagcacaagcaatatacgaacgaaactttggccgagatgaagacggccatcagggtattgaacagcgagatgaaaaaaaatcaggagtttctgaacaacgagttccaaacaaacaatcaagtgatcaaagacgaactcgagaagatcaacaacaatctggggagcaagttcgacatgttgagcgagaaggcgaaatcagaactcagcgaaatcgagaaaaacagcaagactatgatatcgaacgctaagttaggtgtagtgttcaatggttggttggattggataaaatacggggctggtgcagcggtctttatggtacctgttttcttcttgtttaaatggttctttgggttatttggtattaatctaggttaaggtatggggaaatattagtttaaaagtagaaaatcaaaagaaatggtagaaatttcggtaattttacctgtacaataaaaataagaaaagccctcaagttttggccgactcagaggacttttcaaagaaaataaagaaggaattaaccttcaaaaacacattattataatcttattctaacacagcaaggttaattccttccacactaaatggaggagttacggtgaaaaaagcattagaagaagcagaaaagaaagcaagaattagagatttcaaagtagaagagttaattaatcaagctcaggttggtttgtctacagaacaacaaagaatgttaatggaagtcttgcataatgctactggagaaaactatttcatcggtaaacgaaagaaaaaaactgatggggtgaagtttgtgcaattaattatggataatgtaagctatttgaacgatataggatatttaaaatctgctcaagaggcttttctttttaaattaagtccttatgttgaatttaaatcaaacgtccttatagaaaaggtaaagcaagtagatctagataatgatgatttagaaatagcaactaatgctttgacacctacatatctagcaaaagaatttggtgtaacaaggaaacacatatcgactataatgaacagtcttttagaaaaaggaatattaggagtagctgaagcaggaatgactacagaagatggacgaatttgtacaagtcgcacttggtttgtaaaccctaatattatgtgttgctctcctaaagatggtatagatagagcaactcaacatgtttttaaaaagtctttaaagaacttcgttgtagaaggttcatctaagaaacacaatttacctgtttatttattttaaacctcaatattttttgaggtttttttatttaaaatccatttattaggtgtaaccatatggttacacaggtgtaaccatatggttacactataggtgcttcaaacccttgataactctcacttttagtatatgccccttctcactctatttaaatagcaattcgttcatagaattgcaaggatctttttttattttttcgttagaaaaaaatacagctttacaacatataaaaaccactcaaattaattgagtggtttaacttaactatgtgactcttgtatttctttcaatgttataacttaaggtgtgacctttttgtcacaccttaagttatgaattgatttgttggaagttatatatttttactctccaataaattgataatcttttcattttgttcaactttttttgatgaattattttttattgtcaatagaatagatacaaatttccaaataggatatgctaatgcaattattattataaatggtattaaagttgtaaaaattgtttgtaatatatccatattattcatactcctttttatttatgaatctataccagaaaacaatccgacaagacataaaaataaaataattgttaaccaagcccatattaacgcatttatcttattattaagatttaacttttctttccaactgctttcataataagaattctttttctcttttctaaattgtttatataagtaaatatttaaaagtattgatatacataatgctgaaaataataaaatcaatatattacattcacctttctaattttatatacacatttaataatactttaaaagtactcgaggcaacaagagtaattttacatagtttctatattaaagtaattataacattttttatcattttttgtaacttattgtattttttgtgttattatagttattgttttaaaagattaatagggagagtgaaagttttgaagaaaattttagctttaatcgttgctttatctgcgtttgtatttctattaccttcaaatttagtcagtgcagcagaagaaagtccagaagtatcaactttatcagataatgaaattgcttttaatttaaactctaatactccacaagaagaagatgtttacgatgatgaaggtaaatatctaggtactatgggtattgaaccattatcgacttcaaattcttctgaaactagtggcggtttccatactatgggtacctatccagttaaagaaggtactagtacatttaaaatatattggaagactggtgtaataaatttaagctatcgtattaatataagcagacctaaaggtctatttacaaagtccaaaataactaaagcttatgatgaatggcatttggtaacaccaccttttactgtaaactctgataaattatctaggcttagaattcaagaaacatcagataagccagctcaagctagatatagagtaaactatggtgttattggacaaggatctataaattatgatttaaattcaaaagtaagtaagcaatatctatatacatctgtttcaagcttctaattagtaatttattataagtaaaatttagaaaataatacaaaaagacctttgcaattcgctcatagaattgcaaaggtctttttgtaattttttcgtttaaatttttataattaaatcgcaagattttcttgtctaataaaaagcggccactataagatatgatactattatttttttattaatatgcctaaaggctatcgaaccgcctaaaggcggccttcagtttttaaatagaatttttagcgtggtttttcattctttaggtgtgttcagatcattgtttagattattattttttaaaaagatctgaacaatgatctgaacagaaaaagaggttaaagtagatgtagcatggaattatctaattgtttgaatggtgttcagtttagatgtttagttaaatttaaaggcggtgatctgaacagtgaagacttctaaacagtggttatcagctgaagatatggctaaacaagtaaaagtatcagccatgactataaaacgtaattgtcaaacttataaagattttataaatgttaagcaaggtgaaaaaaacaagtatttaattgattcatcttcgttaccggtttttctatttatagctaaaatgagaaacaaacgaagtctacaatctgctcagatactagagctattagaagaagaaggtttcccaaaaatttatgatgaagaaaacataaacacttctaaacaacaaactgaacaatccttagataagcaagggattgttcctgttcaggacatagaatcaatggttgctaaaagggtccaggaggaattgaaaaagcatgagcatttcttaagtgaatggacacttaaacaagaagaacaacagaggaaatttcaagaaggattacttaaaaggttagatgatcgagatcaaaagctgatgagctctattagagaattacaagagtctaaattagagatagcagcatctattgaagaacctaaaaaaactctcaataaaaagtggtgggaattttggaaataaaaaagagcaacctcatttttgtcataggagagtgaggttgctttcaaatacgttgaaatttcaagtaattattgaaaatataacatatattgggtattaatgctattttttagctcgtcagcatatgaataaaaggtgcacttcttatacattagtttcttctccacctactgagaaaacgttgatttatcaactatgtataaaaagctgcatactccggaaaaagaaccctcggcggaaccgttctgcgacaagggttctttttggtggtgtgttccggaaagaggtattatgttaactacctttgtatatcctatacagcgtgaaaacagaaaaactcccccaatgcgttaagggagtttttctgtgtgaatacatataaggtttgtaattgacgctttgcatcgtcttgggtaatttgcttaaactaatgaattttattcttaaataattaaaaaaaaagaaagctgtcagggaggacagctttctttttcataaggttgcagtggaagacgccgttcaggcatcttgagtagtttgctcaagttcgtaagaacttatgtctaatcagtagttttttcttcatgagatatagcaacttcatctttatagtcaaaatctgctttttgactgattttcccttcttcaaagattacttggaatctaatcttcttaatattgtcccaagatcctctaccaaatagaaatggattcatttcataagttccagttccttttctaatcataatcccttctttaacaagcttattgatgttgttatttaaactttgaactgtattaaaccccaattcttcagccatttgtttttttatgtatgcatttaaaacaacgatgttatcataggccattctttttagaagaacatttaatgtcttctgaataccacttgataagttatttatctgtaagatattatctaaataaatttttacgtaatcaggttctttggaaacgtatgattcttcgatatgtctttgaaatagcttttctccatcatcattagtaactgtttctttaacttctttattgattttttttctttgtgtatctccaattaagtccttttcccaatctttcaaattcacacctcttttatattataatttataatctgtatcgtattataaaaaatagataatttcaaggtattttgttataatttataatctatttcagattataaattataacaaatataattatgatctgtaacgtatgtgattataatttataataaatacgattatagtttataacgtatacgattatagttaattcaaagaaatgttgttatatcaatgtttatagagttttatctcttcttttcttttattttatgtacatgttttttgtgttgttttgttgggttccgaaaagaggtattatgttaactaaagatgtatatcctatacagcttaaaaagagaaaaactccctgaatgcgttaagggagtttttctgtatgaatacatataagatttgtaattgacgctttgcatcgtcttgggtagtttgcttaaactaatgaattttattcttaaataatcaaaaaaaaagaaagctgtcagggaggacagctttctttttcataaggttgcagtggaagacgccgttcaggcatcttgagtagtttgctcatcatataaaatctttattctgaataggcaagttacttaaaacaaagaaggtgaatatactgaaactgataaaatcatacaacattagttttcccactctcataggctatctcaaaaacctttggatcattgatcccagggcttttttgatatagttcattaatatatgaaagtctctaatttcaagatgaacctttttactccttgtacatattttgaaagtataaatatataggagtgaaaatatatgctcattcgtcgatggtggcgttggcaatgtttacgttggtggagatcatggctacaaaaatgatcttagtatttgattgttttatatatgaaagtgaatatattttttaacttatggttcctgtaaagtacattatgttaactgaatttatatatggtatacagagtaaaaacagaaaaagaccactgtttcctatacagtagtcttttttctaaaccttgccctaaaggtttattttgatgtttaatacatctcgggtagtttgccctggttataatgttctaattcatataaaaagcaaataacccatgaatacattgtattcatgggttatctactagttcaattcatgagcacgtggggctcttttttagattatatgcttgtctttaaagttctatgacttgtttctttcaaaaaaacaaactacccctaagccgtttagacaggtgacgaggtagtttgttaggtgtaatggagtagaagctgtaacgaagggactctactcatcttgagtagtttgctcaaaggttgcagcaactatgcaacctttacatagcagatttgcaatatcctcttgtatagatatttaatgtgttccgaaaaaatccattatgttaactaggattgtatatgatatacagcgtagaaagagaaaacctcctcatgcgaataagggaggttttctcttttttgagatgtaagctcttgttttaaggatagatgcctcacggcgtcttaggtagtttgctcgaatagtcgattcctatccgttttatttttaaccagcagcctttgaacccgaattagatcctaagttccataaactaaatatagtcgtgattagaccaagaactacgcttgaccaaacctctccatttgttaatgagtagataaatgggaaaattataaaccagacgccagtaatcgcggagatccaattttgccatgaattccagccgggtttgtcatagccccataacgatacaataacttgaatgattccaaaaactatacttgaccataaagctcctgattgatctgaatacccgatagcccaaggtgcgataataaaccagacaccaattaatgcatttaaattaccccttaatttcataattacacctcctctaagtttaggaatctttagagattccattgttagattatatgtttagaaactatagagattaactcaatatataacaattaaataaacagaatatttaaacaatacctttactttgtaatcgctttcatttataatcaagataggttggatggcatgagtggctgtcatagtatttagcgtaggtggggctgatacaagggatcagggcataaaagaaatgtccttttttgctttggaaacatttattaagaaatggaaagcttttattttttcacttggttgattaattagagaggtgttttatatgaataaaaatgaagatattaacgtttttttattaatgttgtcggtgatctctatttgtgggggattgttattaacaaatgtttttatttattcccctcttattggttggcttgtagcagtattttgtttaataatgaattttatttataaagaggaacaactgaaatatagaaaaagagaagattaagaataggatcttctctttttttatggattcttataacgtgttttatgttaactacataagacaggaaaaaccaacctttaaggacttaaaggttggtttttctcacgactttatccaatgacaccttacggtatcttgtatagtttgctcaagtaataaaaacatattcaattctgaaaaacaaaaaccactggacctaaacagtggtttttgttcgttcaatgcagaaaatgaacaaaacatattgcatatacaatgttttgtcagtgtctgtcagtataacatgataattacgttttagagggaatgatacatttatgtatagaaaatgaaacatcttgtatcattgctgacacataggtttgttttaaaagaagttatagcaggaaatatcatcttgcatttgaatactagtactatacttttaaaaaggaattggaggctagtatgatgctggtaaaaaagatgttaaatggcattatgatgaaagaaatcaccattaaggaattggctgatcgatatgatgtaagcactcgtacgattcaattaaagattaagaaattaggctatgaatgggacagtaaggaaagcatttatcgctatgttggggaagaatcagaacctttagatgttgattttagtactcttatctctaaaaacagtaaaatgccagcagaacaaaagttatctactagtgaagtagcagctagtacgagctatcttgatgaaagtggaagtacgagtactagctcttcaaaagctagcacagtagatgcaatagaccttttgctgcaaagtccaaaagaccgttcaaaaagagtctatcgggggttttattttgatgatgatgtgttaagcattattgatcaagttcctaaaagttataagtctgaattagtaaatgaagctctaagaaaagtatttaaagaaaaaggattattggattaaatagttgtttaggaatatagattgaaagcactcagttaatgatttagacttaacaatatattatatttccaaattgatactataagaggtgatcaacttggtaaaaggaaaaggattacaatggatagggtttctaattgctttagcaggtatatttgtaaacatgatcacggaaaatagtacagtgaccgttactatgctaatcattggagccattgtactaatcattggactatttgtaagtaaaaaaagtaaaaatggaaacataaagaaaacagtttaaataagagccaaagctgaggtttttcaacttcagttttggcttattttattttctataatttaatagctattttttttacaaggtacgagtcgtattttttaagaaacccacttaaaaaatctccactcttttccccttgcataaaaaatttcggcaggtttggatctcccgccaagccgacatacccaaaacgaaggagttaggaaatcggcttgtttaggaaagtatacctgccgaaccgctagatcagccgtcctaaagtgttcatcttatttcaagatgagcaacgcacttaaaaacataagaagccagcctctaccccaaaacaaagggggagataagttgcattgtcaatggtaagcggaccgtagggagcattaaggaattgacaatgtctctacacccaaaccctcttggcactcaaacaaccacgtttgtttgacgccaaccggcgagggagccccctcaaagttttgagggggttgggggtgtttgtagaagccattccaaaggagctttcctttggcaggtgtggacagcgtccgcggtttggctcccccttggaaagggggctggggggattgttatgcaaagcataaccaagctcaattgggtaccaattgtagagcttgccttattccgactgtttggtgtattatggaagcatacagctggaattttacaccaagttcaccacgtccagtaggtgaacataaggaggaataaaggaatgagtgagacgaaaggcgagcgtaggaacgagcctaaacaggtgaagttccgtgtcactgaggaggaattcgaacggctatcgttgatggcggataacgtaggaatgacggtgcctgcctttgtgaaagcaaaggcacagggtacccgcgtacgacagccgaagatcaatcgtgagggtgctctagcaattgcgaaggaattgcnnnnnnnnnnccccccccccccccccccccccccccccccccccccccccccccccccccccccccccccccccccccccccccccccccccccccccccccccccccccccccccccccccccccccccccccccccnnnnnnnnnnttagtcaaaaaaatggtggtcgataagattagtccaaaaccaaaagttgatagtgtagaaatcgtcgaaatcgaatttaactaggcgatttcttaacgtgcattgtcctattatcaaaacagaatgttctgtcatgataataggacacttttaagctgtttttgaacgtcaaattaggtaattaacaattgtaaggctgctttcgttaacataggcaacaattgaataaacacataagcgatacttgttttnnnnnnnnnngtactaatgtattcggttgcgcttacaaacactgcaagtagttttatcgtgcatcaattgcacatgccagaacctccaagagcaattttatcacttgtattagttcttggtcttatcgctatactaaattttggtcaagatattactgtaaaggtaatgagtatgttagtgtatcctttcatcgtttctctactgtttatcgcaatatctttaattccacagtggaatacgtcaatgcttagtttttcagctgtttcaactgcttcaacaggaacaggctattttgggacgatattgatgattctaccaatcatcgtattctcatttaatcattcacctatgatttcatcatttgttgtgaaacagagagctacgtatggaatcgaagccactgatgcgaaatgtgcgcaaatacaaaaggtttgttatattatgacattcgctgttgttatgnnnnnnnnnnatcctcccatgccagggaatccacccataccaggagatcctcccatgccagggaatccacccataccaggagatcctcccatgccagggaatccacccataccaggagatcctcccatgccagggaatccacccataccaggagatcctcccatgccagggaannnnnnnnnngtagtaagaactaacttcgttattccatgctgctttataagttgtatcaccgaggttatgaatgttttagaaaactttgacgtgtggattaatttgccaataagcattcatatcaatcgttgcatatccaggaatctcttgaacatctttagatggacctttagcaactaaagaagttgtaaagccataaacgccattatcccaaccagcagataatgtaaagttttgacgtggacggtttggggcatcttcgtcagtatcatcattttttggttgtacataagcatattctgcatttgcaaataagctatcctgtttccactttaaaccaagctcggatccagtgaacgttgctttcttcagattataaaacttaaatcctgtagaggcatcagataccatgaggttatcgactttggtttgataaacagaaccnnnnnnnnnnagatttgtaatccttctacacctaaaccttggaaatcatatgggcttgtacgtggtttaaacgcgccgccacgaagtaatttcaagcctttatcacgaaccgcaccagcaactgttgctacttgttcatacgattctaccgaacatggaccgaatacaaatgttggagtcccgttaccgattggcacgccatttactggaacaattgtatcctctttcttattcttacgcgaaacgagcaatgcttttgaattatcgtcttcttgtaattccaaaccagctttgaaaatttctttaaatagcttttcgattgtgctatcttcaaaaggacctttattcgcatccgtaatcgcatttaacatttgacgttcacgaactggatcaaaacgaataacgccttgcattcctttaattnnnnnnnnnnttgttctttgaaaactagataacagtaattgctgaggaaaagtgaaacttttctttaatcaaaccaataaataacacaacagtatgttgtaccatttattcgctaatggttaagttagaaagggcgcacggtgaatgccttggcactaggagccgatgaaggacgggactaacaccgatatgcttcggggagctgtaagtgagctttgannnnnnnnnncggtaagacgtgccgcctctgcactccgcagccggatgaccgacatcggccatttgataacggcggctttcacatccggaaatgccttcatttcaaaacgccagtcgtcagccgcttttgccatcgcaaattcataacgcccgccctgataatggtcgtgcgacaaaatcgaaccgccgacaatcggcagatcggcatttgagcccaggaaataatgcgggaaccgcccgacaaattcaagcaatctttgaaaagccgctttgtcgattttcatatcgcggtgtgtttctgacagcacaatgcaatgttcgttgtaatacatatatggtgaatattgcaaataccacggctcgccgccgagggtaaggcggataagccggtggttcgaccgtgccgggtgccccgttctgccggcatatccttcattttccatgcaaagcaggcatttcgggtaatggccttttttggcgtttttttccctggcaatggactttgggtctttttccggttttgaaagattgatggtaatgtcaagatcgccgtattccgttgatgtcttgtatacaatgtttttcgcaatctgcttcgtttggatataatnnnnnnnnnntaataagaaagggggatacgaaattggagaatgtattatgttgtgaccaaattaaatgtttagttggtgagactgtcaaagtaaaccttcgcggaccagaaagtcgagttggtgagcttgtatcgttaggcaaagattatctaacgttacaattaccacatggtgaattagtatattatcacttgaagcatgtgaagagtctagttaagaaagtaaaagaaagtaaatgtggtgattgctatagttcatgtttctgctctgatgaggatacttttctagatatattaaaagacttgaagtataagtgggtaaaaattaatcgtggtggtccagaatgtgtggaaggtttgttaagtgaggtacaccatggctgcattacactagtaaactgcgatgaagtgatttatgtagttaagtctcatattaagagnnnnnnnnnnttttgctaaacagtcgcctgggcctattcactgcggctctctcgggctatacaccctaccagagcaccccttctcccgaagttacggggtcattttgccgagttccttaacgagagttctctcgatccccttaggattctctcctcgcctnnnnnnnnnnttcctatattgcgcataaattatcaatggtatgcggggtgaaatccggtttgcctttgacgcgggaagtatttaaaggaaatacacccgatgggaaaacattagaaccgacattggaaacgtttaaggcagagcaccccgagatggctgagcagttgagctttatcctggcagatggaatctaccaaacgccggagaatcaaaaagcgacaaaggatgtattacaggcgaaattggtggcaccgatcaatccacggaaccgtaaagataaaccaactaccgcccgggggattgaaaaaatcaaccggtacggcactcccatctgtatcagtggacataaaatggaacttagaggatctgatcgggaaaaggggcaatatatttacacttgtcctgtatttcatccaaatgccaagcaagaaggtctcacctgcccgctagcgaatcacgcggaatgttgtaatggggaaggacaaggannnnnnnnnnttgatcttcttgtataactcgtaagcattctatattagtgaaagaagaaaaaggcatgttgagattcgctcctttttatttcactatatcatctataaagcaccttcaccaaaagtgagaaagagccatgctattttagcagtcacattctttcttattgtctgttaaaagaaatataattctggggagagtgtatttttttatttatatcggtataaacataaagtgcatatagttatttgatttatgtaaattcaactacctttatagctttagtaacccttaagctgtttcaattaaggtgctgaatgcttttttttaaaaaatcatcttcatgatgaatgaaacacattctgaagaagaaaaagtacaactcatgttatactaagagaaaagaacaactgatggaggatataatgacaaaacgattagacctacgtgtcgattttgcctttaaatctctttttggaacgcatggaaatgaatctattttaactgcatttttaaatgcagctctacgtttaccagaagaaaagaaaattaagacggtttatctattagacccgcattttaataaagaaaatcaggaagataaacgctctattcttgatgttcacgctcgattagaagatggaactcgtataaacattgaaattcaacttaataataaacatgatatggaaaaaagaacactttactattggtctaagatgtatagtagtcaaatgaaggaaggcatggactatggggagctgtgtcaaactattaccattaacattgtcaacttccgttatttatctcatatcaatcattatcattcagtgtttcaattgtatgagcgcgaagaaaagttgttactaacggatatgttagaaattcattttatggaacttcctaaattacttattaaatggcgtaaaaaagaagttgatccaagggaagatcaattagtacgttggttattgttacttgaagcatcggaagatgaagaaatcactcaagtactggaggagattgcgatgcaagaagatcaagtattgaaaaaagcaatagatgaatgggaacgtgtcagtcaagatcctgaagtcttactcgcttatgaagcaagaagaaaggctttattagatgaaaaatctgctttaagaagagctgagaaccttggagagaaaagaggaagagaagaaggcagaaaagaaaccattaaaacaatggctcttggcatgattcaaaaagggatagacaataaaacgataagtgaccttacagggctatcacaagaagaaattaataaccttcgacattaataaaatgaagaaaaaaagattaccttatcatctaataggtaatcttttttctatcttcatattttacaacatatgattttcttatctttaaatgtgaacagaatctttaatatgaggtaggggctatatatattcctcatcaagattagtcatgtgtcatccagcgtatcaaaatgcagtagcagatggatatgtgatggcttcatttgctgtcattagcattaaaacaaagatatattaaccagataggttatgctataatagtgatgggaataatacgtgaatcatctaatgcattcaacgtagcaaagagccacttgtagtatacaagtggcttttacttattagaaatctatatacttttatttgcattgattaataaagatagaaaaaatacatacagatgaggtgtgaaaaatgattcatctatatacgacaaccagctgcgtttcttgccgaaaagcaaaggcttggcttgaggaacatcaaattgattatattgagagaaatctatcgtatgaacctattacagaagatgaaattaaaaatattcttagtatgacagaaaagggtacagatgaaattatttctacaaggtcaaagatccctcaaaatttaaatatagagatagatgcactgtcgttacagggtctgtatgatttgataaagaaccatccttttatacttaaacgacctattattatacaagatcgtaaaataatgcaaatcggatataaggaagaagagataagagcttttattcctcggaaacttcgtacttttacgatgacagaacaggaagtaataggtaatcattagagggtaatagaagaacgatcaacggctgccttgacttctaaagtagattgtaataaaagacatcagcagtgtaataaggtatatatttcagattctaaaaaatgagtaaatacaacaacatttacataaaaaggagaagagtaaaaacccttctccttttactatataatcctctatacttagatactcttcttcatgctgcattcccgacattcgcgtaaaaaaacgccaccttttacagaacttttgaagtaagatgaattgcagttgtcgcatctgccactgaccttatccggaaattcagcatagtcatacactttatcaagatcgatttcttgctcttttatttcttctaggttgatcactcttttctatttatctctctttagactaatacaattatatcctttctctagatcaatagaacaactaatcatgtattttgttaggaaccctttttttactgggttgataaaagtgttatattaacaagtaaacaaacaataaatttcataatttaacattttatagaaaaaataattgatctttttataataaatgttgatattatctacgcttactgcagtaagggaggagtaggtagtgatttaaggtgtgcttggattatagatgctatgggttgtcctcgtcacttaatctttatctttcaattattttacctataactaaataggcagatagttggcagttttaaaaatacattatgacaaaacctgtgttaattttgccaattaaagatatgactgacaagactatctctaaagagtccgagaagtgtccagccattaaaacaactgctaattctctaaaacaaaagattaataataaacgtaatgatgttcctatttcagcaaataaagttattaaaactttttcaaaagcaaacttcattgctcattggtacagaaatatttgctgacttaacaagctgctattatacagaagcttaaacgattcaagaattgtggaaagttgtgaagcaatgcaaccaagtagtaaactatgctacttctgaaagagcatttactccacaacaagaactgaacattggtgttagagcatttaaagagcttgtgataaaggtaaaagataacacaaaaatgcaaaacaagtttggctattttaacggtattgtaaataaccttatggatgagccctactttgactatgaattgttagacaccttttaatagtgatttattattcatagtagatattttttgatatccacaccttttttaaattcttactttacataaaagtcctaccacaatataatacaatagtattggttaatgaaggtatttttagtttttttatccaaatgatagtttttttatcctatgaaataagtaagaggtacttgtatgttacaaaggttattattatcgtttttaattctatttttattagtaagttgtgacaaccaatctattgaagtttcattctctcaaactgattgcaaaaaaaactggtctttatgtcccctatttcctaataatactagaatctctatgcctactgagcccgtgaaagtagccatattagatagtggcattgacaattctcaccctttattaaaagaaaaaatagtaaagtcttttgatgctagacgagagactaatatcactaaagataagtttggtcatggaacagctatagctggaataattggagcttcttctaataaacagaccatccaaggcatttctccaaatgttgaaatatacgatgtcaaagtacttaacgataaaggaggtggtgaaattaaagatgttgttaacggtattgagtggagtataaaacagaatgtagatattcttaaccttagttttggatttcagaaagatgatccaactctgaagcaggctattgattatgcagttgataataatattatagtagttgctgctgcaggcaacactttaggtttttctgccgactatcctgctaaatataataatgttatttctgtatcatctgttaacaaacaaatggagagagataaatttgcagcgaaaggaaagatagattttgttgctcctggggtagatatccctgttttaactccaaccaaaaaaattatcaccgttagtggaacctccttttcagctgcatatgtatccggaattatagctaatattctagctaaaaaaccgaacgttcaaaattttgatgctgtattaacagagttaaaaacgtcttctaaggatttaggagaaaaaggactagataacgaatatggtaatggtttagtacagtttaaataaagctaataccagagttatttagaatatactaataaggggaatactttaaatgaaatatgtattaagtcttttggctgctgtttttattttttcgaatgcaggtccatactacgcctcagctatctcagaggtcaataaatcagaggaaaagaatgaagaactaactccaattgacaacgaagagttacaaacagaaactgaagatatgtttggagaaactttagaggatagtaatgttgaaatagaaagtacagtcgttgatgaaactgaaattattgaaacaacaatagaaacagatgatttatctgcacaaggagaactagaactagatttagaaagcaatgagatgatggtttctgccgagctagaaaatgaatctggtgagctagttcagcaaaattttgaagttttcctaagtgaagttaacggagaagattttgttgctactttaagagatattgaaactggtgaagaatataaggttgatactacagaggtccaagcttcttggtatcctttaattttaatcgctatacaagtggctagatttggtataaactacgctataaagaaacacggtaaatcaattgtaagtaaagcagtatctaagtatggtaaaaaagctactactaaagatttgaaaaaattaaaattctctaatagtagtttattagattcacattataaagatcataaagctgaatttggtaacatttctaaatctcagtatttaacaagagcgcaatctcttgctggcgttgatgctaaacatgtattgacaaagaagcgctctaatggagatatactaaagtataatactaataccaatgagctattagttcttacaaaaaatgatgtaataaaaactttctttaaacctaaacaccctaacaaggctaaaggtagagaatatttcaatagacaataatatggaggctgagagtattgaaatatgtttgtccagtttgtggatataaaaatctagaggaagctgcttatgatgaatctggtctagcatcgtttgaaatttgtatttgctgcggttttcaatttggtgatgatgacgatgtagagatagaagaaggagttttcatggatatccctgaaacccatagacttcatagaaaaaaatggattcagaaaggtgctcctgtatttaatactaaatactatccaaaagagctccagtctaatggtcaggtaaaagagcaatacttaacagaacaattaaataacatcaatgttgattataaaaatttctaataaataaaaaaacctttccttacttttttacaagcgggactgaccccctagagtgagacaaataaaaaacacctttaagttaaaaaacgggtatgtagtacctaacaataacttggaggtgttttttctatggggacaagagtcagttatccggtagaagtannnnnnnnnncatcacagctcagccttcatgatgagcggatttgcctactcatcagcctaactgcttgaacgcgcatatccagcagcgcgcttaccctatcctactgcgtccccccattactcaaacggcggggagggggtacaggaatatcnnnnnnnnnnatgatgagcggatttgcctactcatcagcctaactgcttgaacgcgcatatccagcagcgcgcttaccctatcctactgcgtccccccattactcaaacggcggggagggggtacaggaatatcaacctgttggccatcgcctacgcttttcagcctcggcttaggtcccgactaaccctgagcggacgagccttcctcaggaaaccttaggcattcggtggacaagattctcacttnnnnnnnnnngtttttaataagttaaattaatttaaagatatataattaatttcttttatacaaagaagtaaatgataaaacttacttatataaattatagttttatcatttactctagctgacgacaaatacaacgtttttctacaagataggtaaatgataaaactgtttttaataaagtatgtttgtttttacttaatgatatagtggaaagttaagataaacataatcactgatctcggaaccaatggatgtatagacctatcgccaatatacacaaagtgaaacaaagtcgactattagaaactaaaaacacccactaatcattttagtgagtgctttccatatgttattattccttattatcatcagccacgacaaagtatttaattgtgtgaatttcacctgattcataaataccttcttgtaattccattactcgcaatgctgtaatttcatcttttgaatcaattacctcaaatacatccccgatacctaacggaatattctttccatgcaaacttccttctttgaagaattcagatgctggaccttccatcaatatctcatcattgtagtaaaactctactttttcttgtcctgtaattgtagttatagtttccaccacctttttctataaattacttacaaataacattttatactattctgaatatttctgttagttttcactctttcgctctaaaacgtatacaatatatgttgatattatataagaaacaattaacttatttcattataaatagcattatataatatacatgttgtagaaaaacccacaattaaactacaacggtaattaagttctgtaaaaaaattaaaccagtatgcctcaacaaaatggaaaaacatactggttatttggattttttgtaaatgactagttaataaaagcaagattaaagtgagtaacaacctcagttacttttacgagaacccactagaatcaaatagataaggaaactaaaaagagtatttaatagcacaagttttaacttgtgaatagaaatctaaagctgcttgtccttgttctctagtatgggaacttgaccatttcataccaccaaatggcacttggtattcaacgccggccgtttcttgattcacacgtaccattccaacttctgcttcttctagaaagagtaatgctttctccatattattagtaaaaatggaggcgcttagaccgtattcagattgattgcaaagccttatagcctcatcgaaattttctgcttgaataatgacggtaactgggccaaatatttcttctttaaaaagtttatgctgtgctccaactccacttaccactataggagggatataataaccttcacttattgtatcgagccttccttcagcgataactgtagcttctttacgagctaattctatatattgagaaatattttcatactggtctttagatgctacaggacctaaataggcatcagcatctaaagcgtctttcaccactaaagttgacatagctttttgtagggaattaatgaaattagggaagatttccttttcaacaataattcggcttgtggcagtgcacttttgtccagcagaacgaaatgcaccacttaaaatcattggaatggtcttctctaaatcagcatcatttaaaataacagccgcattctttccacccatttctgtttgaaactttatattacgtttggcgcatatagatgcaatttgagttcctgtttgtgtggaacctgtaaagctaacggcatctatatctgctttttctaataatgtatctcctatcattcgtcctttagcaataacaagattaagaacgcctttcggaagatttgctttttcaaagatttccatcaatcgagtagcggtaagggcagaattttctgcaggcttccatactacagaatttccgcaaataagggcgggagctattttccagataggaatggcaactggaaagttccaaggggtaattacagcgacaactccgagaggaactcgtttagtatattgtaaaacatgttgatcactagctggcaccgactgtccgtcagcccgtgctccttcggccgcataatagcgtaataaatttactcctcttgttacttcacccagcatttcactaataggttttcccatctcccgactggctagagtagcaacctcctctttagctctttctagctcatcagccattttatataagtaattggctcgttctatacctgtttgttttctccatgtattaaaacccatttgtgcagatgaaacagtatataaaatctgctcaggtgtagagaagtacatatccccaactttttcattaatgttagatggattatatacagttttactagtaccttggagttcctgccattccccatctgtataatttttagtagttaaatttacttttgtaatcaaattaggtccacctttcctacttaaattagtagaagagaagaaataatttcttctcttctcaatagaatgagcaaagttcttattgagttactttttgtacagctcgattaaatgcttttttgatttgattataatcttcagtacttaaggagagcctaggtggacgagtaggaccaactggttgtcctgccagttccatcatatatttgattgactgaacaagctgaggttttgcatccaaatcaaataatggaagtaaacgacgatataactcagttgcctcttttattttcccctcccttgataaacggaaaagctctaccccctcacgtggaagagcatttggaacaccagctatccaaccagttgcaccgcaaaggggaccttccatagcaaggttatcaacaccagttaaaacttcaagatctgtttcttctaaaattttatgaacacgacggatatcaccagagaactcttttacagccactacgttttcaaatttcgagatttctttcaaaagttctggagtaagatcagttggataatctaacggattattgtaagcaataataggtaatccaacttcggataaatctttataatgggcaataatttcatttctaagtggacggtaattaataggtggaagtgccataatagcatctgcccctacatctttagcatgttgaacccattgaacagcctgtttagtagaaggcgcccccgaaccaacagttacggtaactcttttgttagctgctttcacaactgtttcgaccactttcgatctttcctcaaccgtcaacgtagcgtattcccctaaagatcctactgggactagcccatttacaccctcatcaataagccaattacatagttcatgtaacctctggtaatctacctcatatgaatctgtgaatggagtgacgatcgcaacatgtacaccttcaaatcttgtcatttaattcttcccctttcaaaatcattttttatttttggttcgtcttgggtgtgagaattaactctacgctaatataaatgcaagtagtatgccaacttgaatttgaagtttcaggagaatttatatatatatctatcagacaaggagttttagtacattctcacggaggaaagaaagatttaagcatgagaatgccacattttaagcctttgaaatcaggaaatcgaaaacaacatcttaaaagagcattctaattagtataaatactaagccgcatataattctctcttaaccttaatagtaattaggtgggaaatattcaaaataaaaaagagtattaaagtgtaaaaaatcttaaaagggagtgtaaagatatttatacactgtatagactnnnnnnnnnncctcacggtcttgcgatttaccgttgacagacctttttttgtatttactctctaccatcatctccatcgcctatatctataaaaggatcatccgtggaatcattctcttcccctatttcacttttaaagaaagcctcatatacataacaaagaccgcccattatctataagtgtataaggcggtcttatctatattcatgctatatatctattcttaaattctcgacactattctcgttgtaaagctccaacagtaatatttactactggaatattacctgtattttagattataatagtgctatcaaaatcaacaatgctcgaaaattttatattgatttttgaaccagctgccgagttgtgccatcaactcggcttttttcttttctaacgcttttttgaaaacaggtgtaatatcttcctctttgatttcctttaacattttacgatatttttctttttttctttttgagaggttggaccattcttgtggatgatccaggagataataaagagttgctctatcctctatcttttccaactcgttcaaagaagggttctttatttgtaaagtatcaaaaacttcaccaaactcatccaccgtctctctttttaactcaaactctagacgccaccacgtatgtaagttagaagtattccctttcttctcttgttccaactgtttattataaagtctaagcatcttatcactttgacgtttacctatatataaggtttcaagcttccttgcagcgtctctaaattcaactgtggacttttgtcttgaattccctataggtatgaattgatattcactcaaatcgaaatcaacatcgaaggctagatccaaacgagtaatacctacatcagaaagtaagggtataacattagtttgtaaccattcgacttgcctggtatctaagttattagggttaaattccattctaaaattccgagtattaaatgatttagcttttaatttgtcatactcaaagtaaactaagtcgtttaagaatttacctcttacataatcatgaaacttgttatccataactgaagtatcgttactcttaataagttcctttaaataaaaaaccttcttgctatttaaatcacctaatacagtcatcctatcaaaatgaatatctagtatattgctaacatccaaaaatcctcacccctttaaaaaacaaataaagcagcacatgttctgaccttttttgacctttgctataacccttgcagctctaaggaccaaaagcttttttttgtgtagtggtaaaccaaaaatgtacccttaaaccggctattagaagaggccggcttaaactaagcttgtttttaactccaaaaacatctcttcacctcttcaaaattacttattagaagcagttttcttttcgagtacttttcctttataaagttcattaacagcatgacgaataatatccgacttagtaggaggaataaaagaatccttagaatataaagcaactaaatcatcaatcatcttagattcattttccgcaaagcgtacattcatattgatatttttattcattactttcacctccctcatactctatttttaatatacattgttttgctatgttttacaagtttcatagttttaccaaaccgcgcattacaaaggtccgtcctaagtgtcctggacgtccaggacacttaggacggacaggacggacaggacaaaggacacttaggacgtccaggacagttaggacagacaggacttttaccccctcgtaacgaataattgatttagtcaaaggagggatagatttgttaaaagcagtccctacagaaagaacatacgatggctctacatttgctgaaaaattaggaatcactccatcaactcttagaaaccacaaaagccaattcactaaagttggcattacttttaaaaataataaaggaaaaacaatctacacagaaaataatctccatatgttcagcgctatgttagatttacacaaacaaggtggcatgactatagcagagtgtgtccacgctgtcctaagtgtccaggacagtcaggacagcatacaggacagtcaggacagcttccaagaatctgttattaccctcaaacaatatgaagacataattaaacaactagaaattcaagaacaagagctacaaaaatgtaaagctcaaatagagagacgagatcgccaagtcacagaactcatgagacaaatgcaagaactaagaaaacagacaggccacaagaaagcatggtggatgttctggaaaaactaaaaatatccttaaatgctaaagaaacagacttaaacctgcttctgatacgagacaacacagttctatgaatgatttatatcttaatcgagcaaactactcaagatgttgtgtagcatcatccaagtagaaattgcataaacgtaacagaaaaaactcctgaacaggtcacaggagttttttctgtttttaagtcgtatatcatatacatctttagttaacataatgtctctttccggaacacaacccaaaaaagaacccttctcgcataagggttctcataaggctacgatttctactttatgcaactttttatacatccttgttctgacggagttccccttacaggtagttggagaaatgatgcataaaaagcgcaccttttatacatatgcttggcctgtaaactatagtctttacagcaggaaatatgttattatttgttcaatgatatttctaccttatgaaaataagtaacaaaataaaaagctacttctcatgctgcacacttaagaggtagctttttattttggtgcagaatgtgttatatcaacatttataaagtcatcaaaagtgacatctatggaataaataaaaaggggtgtttctctggaaatagaaacaccccttataggacttagtatagacccttattatatcatttccctaaagtgaaagaaaatagcgtttctcttttaagagaaacgctattcctgatctggtgaccttagattagtagacttatggattaagtagtccaattattattataatgttttttgtcagacatgtcatcggtcaatattttgaaaatgttaatgattatgtcaatttaaaaatcaaagtaccttcccaggtcatcctcactatttaataatctctctttattttcctttttaagagatttttttgcttttttatatctaagatcctatttttgaaattcatcgctcagacagcttatacgagccgcatattgggtatctagttatcttttaaccttttcttattgttatcttttccttctctttggttatgtttctggatccccgtcattgtgtctttgtgaaacttttacatccggataaccccatatttggccatccctcaatcccctatttcgaccactgtacttaggttcagcacaccaaaattttagatttggtgtaacgcactacaccaatttttcatcttcgatcaaattgggagcgcgctctacgaggtggcggtcggcgttcctccctgtgtttggctccgccaaaatgaaaaaagacatcctaaacggatgccctttttcatgaagaccgtggacgccgtccaccacctgccaaagggaagcccctttggaatcgcttctacaaacacccccaaccccctcaacctttgaggggggttccctcgccggttggcgtcaaacaaacgagtttgtttgagtgccaagagggtttgggtctggtgaatctatcaactccttaaattctcgacctcacggtcttgcgatttaccgttgacagacctttttttgtatttactctctaccatcatctccatcgcctatatctataaaaggatcatccgtggaatcattctcttcccctatttcacttttaannnnnnnnnntaatagaacctgccactatactttgctcgtgtccatctaccatcacgataggtagccaatcatttgcactaccttctgcaaatgccattccaagcacaaaaagaccaattaaaagcacctttttttccatacgtaaggaagtacgcttctctctccttttgttccgcgatttctccttctttcctgttccatgcggaagaaaacgatacaccatacatacaagtaatagaaacatgaccgaaatcacaagaaactgatacagaatcgggatgtgaagcgacgctgcgacagaaccactgagcgcgcctactaaagttcctacactaaaaaagccatgaaatttcggaagaagagttgttcctaatttctgctcaatggaagaaccttctac
